(19) United States
(12) Patent Application Publication
(10) Pub. No.: US 2025/0099579 A1
(43) Pub. Date: Mar. 27, 2025

(54) MULTISPECIFIC MOLECULES BINDING TO TCR AND USES THEREOF

(71) Applicant: Marengo Therapeutics, Inc., Cambridge, MA (US)

(72) Inventors: Andreas LOEW, Boston, MA (US); Madan KATRAGADDA, Acton, MA (US); Gurkan GUNTAS, Newton, MA (US); Jonathan HSU, Waltham, MA (US); Sangeetha PALAKURTHI, East Walpole, MA (US)

(21) Appl. No.: 18/286,062

(22) PCT Filed: Apr. 7, 2022
(86) PCT No.: PCT/US2022/023922

§ 371 Date: Oct. 6, 2023

Related U.S. Application Data
(60) Provisional application No. 63/172,468, filed on Apr. 8, 2021.

(51) Int. Cl. A61K 39/395; A61K 38/20; A61K 39/00; A61P 37/04; C07K 14/55; C07K 16/28

(52) U.S. Cl. CPC A61K 39/39541; A61K 38/2013; A61P 37/04; C07K 14/55; C07K 16/2809; A61K 2039/505; C07K 2317/24; C07K 2317/33; C07K 2317/92

(57) ABSTRACT

Provides herein are multifunctional polypeptide molecules comprising T cell receptor variable beta-binding moieties and cytokines and methods of treating conditions or diseases in a subject using the same. In some aspects, described herein is a multifunctional polypeptide molecule comprising a first polypeptide, a second polypeptide, and at least one cytokine polypeptide or a functional fragment or a functional variant thereof.

### RELATED APPLICATIONS

[0001] This application is a U.S. National Phase Application under 35 U.S.C. § 371 of International Application PCT/US2022/023922 filed on Apr. 7, 2022, which claims the benefit of U.S. Provisional Patent Application No. 63/172,468 filed on Apr. 8, 2021, the entire contents of which are hereby incorporated by reference.

### SEQUENCE LISTING

[0002] The instant application contains a Sequence Listing which has been submitted electronically in ASCII format and is hereby incorporated by reference in its entirety. Said ASCII copy, created on Jun. 3, 2022, is named 53676-743_601_SL.txt and is 1,322,327 bytes in size.

### BACKGROUND

[0003] Currently available molecules designed to redirect T cells to promote tumor cell lysis for cancer immunotherapy typically target the CD3 epsilon (CD3e) subunit of the T cell receptor (TCR). However, there are limitations to this approach. Previous studies have shown that, e.g., low doses of anti-CD3e monoclonal antibody (mAb) can cause T cell dysfunction and exert immunosuppressive effects. In addition, anti-CD3e mAbs bind to all T cells and thus activate a large number of T cells. Such non-physiological massive activation of T cells by these anti-CD3e mAbs can result in the production of proinflammatory cytokines such as IFN-gamma, IL-1-beta, IL-6, IL-10 and TNF-alpha, causing a “cytokine storm” known as the cytokine release syndrome (CRS), which is also associated with neurotoxicity (NT). Thus, there is a need for improved T cell receptor-binding molecules that redirect T cells for cancer immunotherapy.

### SUMMARY

[0004] In some aspects, described herein is a multifunctional polypeptide molecule comprising a first polypeptide, a second polypeptide, and at least one cytokine polypeptide or a functional fragment or a functional variant thereof, wherein the first polypeptide and the second polypeptide are non-contiguous, wherein (i) the first polypeptide comprises a first portion of a dimerization module linked to (A) a first TCRβV-binding moiety comprising a first heavy chain variable domain (VH) and a first light chain variable domain (VL), or a single domain antibody, or (B) a first portion of a first TCRβV-binding moiety comprising a VH of the first TCRβV-binding moiety, wherein when the first polypeptide comprises the first portion of the first TCRβV-binding moiety, the multifunctional polypeptide molecule further comprises a third polypeptide comprising a second portion of the first TCRβV-binding moiety comprising a VL of the first TCRβV-binding moiety, wherein the third polypeptide is non-contiguous with the first polypeptide and the second polypeptide; and (ii) the second polypeptide comprises a second portion of the dimerization module; wherein (a) the multifunctional polypeptide molecule comprises a single TCRβV-binding moiety and the at least one cytokine polypeptide or a functional fragment or a functional variant thereof is covalently linked to the second polypeptide, or (b) the multifunctional polypeptide molecule further comprises a second TCRβV-binding moiety and the at least one cytokine polypeptide or a functional fragment or a functional variant thereof is covalently linked to the first polypeptide, the second polypeptide, the third polypeptide when the multifunctional polypeptide molecule further comprises the third polypeptide, or a combination thereof.

[0005] In some embodiments, the multifunctional polypeptide molecule comprises the second TCRβV-binding moiety, and the second portion of the dimerization module is linked to: (A) a second TCRβV-binding moiety comprising a second VH and a second VL, or a single domain antibody, or (B) a first portion of a second TCRβV-binding moiety comprising a VH of the second TCRβV-binding moiety, wherein when the second polypeptide comprises the first portion of the second TCRβV-binding moiety, the multifunctional polypeptide molecule further comprises a fourth polypeptide comprising a second portion of the second TCRβV-binding moiety comprising a VL of the second TCRβV-binding moiety, wherein the fourth polypeptide is non-contiguous with the first polypeptide, the second polypeptide, and the third polypeptide; wherein the at least one cytokine polypeptide or a functional fragment or a functional variant thereof is covalently linked to the first polypeptide, the second polypeptide, the third polypeptide, the fourth polypeptide when the multifunctional polypeptide molecule further comprises the fourth polypeptide, or a combination thereof.

[0006] In another aspect, described herein is multifunctional polypeptide molecule comprising a first polypeptide, a second polypeptide, and at least one cytokine polypeptide or a functional fragment or a functional variant thereof, wherein the first polypeptide and the second polypeptide are non-contiguous, wherein (i) the first polypeptide comprises a first portion of a dimerization module linked to a first portion of a first TCRβV-binding moiety comprising a VH of the first TCRβV-binding moiety, wherein the multifunctional polypeptide molecule further comprises a third polypeptide comprising a second portion of the first TCRβV-binding moiety comprising a VL of the first TCRβV-binding moiety, wherein the third polypeptide is non-contiguous with the first polypeptide and the second polypeptide; and (ii) the second polypeptide comprises a second portion of the dimerization module, wherein the at least one cytokine polypeptide or a functional fragment or a functional variant thereof is covalently linked to the second polypeptide.

[0007] In some embodiments, the first portion of the dimerization module and the second portion of the dimerization module are dimerized.

[0008] In some embodiments, the first polypeptide comprises: (A) the first TCRβV-binding moiety comprising the first VH and the first VL, wherein the first TCRβV-binding moiety further comprises a first heavy chain constant domain 1 (CH1) linked to the first VH; or (B) the first portion of the first TCRβV-binding moiety comprising the VH of the first TCRβV-binding moiety, wherein the first portion of the first TCRβV-binding moiety further comprises a first CH1 linked to the VH of the first TCRβV-binding moiety.

[0009] In some embodiments, the first CH1 is linked to the C-terminus of the first VH or the C-terminus of the VH of the first TCRβV-binding moiety.

[0010] In some embodiments, the second polypeptide comprises: (A) the second TCRβV-binding moiety comprising the second VH and the second VL, wherein the second TCRβV-binding moiety further comprises a second CH1 linked to the second VH; or (B) the first portion of the second TCRβV-binding moiety comprising the VH of the second TCRβV-binding moiety, wherein the first portion of the second TCRβV-binding moiety further comprises a second CH1 linked to the VH of the second TCRβV-binding moiety.

[0011] In some embodiments, the second CH1 is linked to the C-terminus of the second VH or the C-terminus of the VH of the second TCRβV-binding moiety.

[0012] In some embodiments, the multifunctional polypeptide molecule comprises: (1) the first polypeptide comprising the first TCRβV-binding moiety that comprises the first VH and the first VL, wherein the first TCRβV-binding moiety further comprises a first light chain constant domain (CL) linked to the first VL; or (2) the first polypeptide comprising the first portion of the first TCRβV-binding moiety and the third polypeptide comprising the second portion of the first TCRβV-binding moiety, wherein the second portion of the first TCRβV-binding moiety further comprises a first CL linked to the VL of the first TCRβV-binding moiety.

[0013] In some embodiments, the first CL is linked to the C-terminus of the first VL or the C-terminus of the VL of the first TCRβV-binding moiety.

[0014] In some embodiments, the multifunctional polypeptide molecule comprises: (1) the second polypeptide comprising the second TCRβV-binding moiety that comprises the second VH and the second VL, wherein the second TCRβV-binding moiety further comprises a second CL linked to the second VL; or (2) the second polypeptide comprising the first portion of the second TCRβV-binding moiety and the fourth polypeptide comprising the second portion of the second TCRβV-binding moiety, wherein the second portion of the second TCRβV-binding moiety further comprises a second CL linked to the VL of the second TCRβV-binding moiety.

[0015] In some embodiments, the second CL is linked to the C-terminus of the second VL or the C-terminus of the VL of the second TCRβV-binding moiety.

[0016] In some embodiments, the first portion of the dimerization module is linked to the C-terminus of (A) the first TCRβV-binding moiety comprising the first VH and the first VL or the single domain antibody, or the C-terminus of (B) the first portion of the first TCRβV-binding moiety comprising the VH of the first TCRβV-binding moiety.

[0017] In some embodiments, the multifunctional polypeptide molecule comprises the second TCRβV-binding moiety, and the second portion of the dimerization module is linked to the C-terminus of (A) the second TCRβV-binding moiety comprising the second VH and the second VL or the single domain antibody, or the C-terminus of (B) the first portion of the second TCRβV-binding moiety comprising the VH of the second TCRβV-binding moiety.

[0018] In some embodiments, the multifunctional polypeptide molecule comprises a single TCRβV-binding moiety, and the at least one cytokine polypeptide or a functional fragment or a functional variant thereof is covalently linked to the N-terminus of the second polypeptide, the C-terminus of the second polypeptide, or a combination thereof.

[0019] In some embodiments, the at least one cytokine polypeptide or a functional fragment or a functional variant thereof is within a single contiguous polypeptide chain of the second polypeptide.

[0020] In some embodiments, (a) the N-terminus of the first polypeptide is linked to a cytokine polypeptide or a functional fragment or a functional variant thereof; the C-terminus of the first polypeptide is linked to a cytokine polypeptide or a functional fragment or a functional variant thereof; or a combination thereof; (b) the N-terminus of the second polypeptide is linked to a cytokine polypeptide or a functional fragment or a functional variant thereof; the C-terminus of the second polypeptide is linked to a cytokine polypeptide or a functional fragment or a functional variant thereof; or a combination thereof; (c) the N-terminus of the third polypeptide is linked to a cytokine polypeptide or a functional fragment or a functional variant thereof; the C-terminus of the third polypeptide is linked to a cytokine polypeptide or a functional fragment or a functional variant thereof; or a combination thereof; (d) the N-terminus of the fourth polypeptide is linked to a cytokine polypeptide or a functional fragment or a functional variant thereof; the C-terminus of the fourth polypeptide is linked to an cytokine polypeptide or a functional fragment or a functional variant thereof; or a combination thereof; or (e) a combination thereof.

[0021] In some embodiments, (a-1) the N-terminus of the first polypeptide is linked to a cytokine polypeptide or a functional fragment or a functional variant thereof; the C-terminus of the first polypeptide is linked to a cytokine polypeptide or a functional fragment or a functional variant thereof; or a combination thereof; and (a-2) the N-terminus of the second polypeptide is linked to a cytokine polypeptide or a functional fragment or a functional variant thereof; the C-terminus of the second polypeptide is linked to a cytokine polypeptide or a functional fragment or a functional variant thereof; or a combination thereof; (b-1) the N-terminus of the first polypeptide is linked to a cytokine polypeptide or a functional fragment or a functional variant thereof; the C-terminus of the first polypeptide is linked to a cytokine polypeptide or a functional fragment or a functional variant thereof; or a combination thereof; and (b-2) the N-terminus of the third polypeptide is linked to a cytokine polypeptide or a functional fragment or a functional variant thereof; the C-terminus of the third polypeptide is linked to a cytokine polypeptide or a functional fragment or a functional variant thereof; or a combination thereof; (c-1) the N-terminus of the first polypeptide is linked a cytokine polypeptide or a functional fragment or a functional variant thereof; the C-terminus of the first polypeptide is linked to a cytokine polypeptide or a functional fragment or a functional variant thereof; or a combination thereof; and (c-2) the N-terminus of the fourth polypeptide is linked to a cytokine polypeptide or a functional fragment or a functional variant thereof; the C-terminus of the fourth polypeptide is linked to a cytokine polypeptide or a functional fragment or a functional variant thereof; or a combination thereof; (d-1) the N-terminus of the second polypeptide is linked to a cytokine polypeptide or a functional fragment or a functional variant thereof; the C-terminus of the second polypeptide is linked to a cytokine polypeptide or a functional fragment or a functional variant thereof; or a combination thereof; and (d-2) the N-terminus of the third polypeptide is linked to a cytokine polypeptide or a functional fragment or a functional variant thereof; the C-terminus of the third polypeptide is linked to a cytokine polypeptide or a functional fragment or a functional variant thereof; or a combination thereof; (e-1) the N-terminus of the second polypeptide is linked to a cytokine polypeptide or a functional fragment or a functional variant thereof; the C-terminus of the second polypeptide is linked to a cytokine polypeptide or a functional fragment or a functional variant thereof; or a combination thereof; and (e-2) the N-terminus of the fourth polypeptide is linked to a cytokine polypeptide or a functional fragment or a functional variant thereof; the C-terminus of the fourth polypeptide is linked to a cytokine polypeptide or a functional fragment or a functional variant thereof; or a combination thereof; or (f-1) the N-terminus of the third polypeptide is linked to a cytokine polypeptide or a functional fragment or a functional variant thereof; the C-terminus of the third polypeptide is linked to a cytokine polypeptide or a functional fragment or a functional variant thereof; or a combination thereof; and (f-2) the N-terminus of the fourth polypeptide is linked to a cytokine polypeptide or a functional fragment or a functional variant thereof; the C-terminus of the fourth polypeptide is linked to a cytokine polypeptide or a functional fragment or a functional variant thereof.

[0022] In some embodiments, (a-1) the N-terminus of the first polypeptide is linked to a cytokine polypeptide or a functional fragment or a functional variant thereof; the C-terminus of the first polypeptide is linked to a cytokine polypeptide or a functional fragment or a functional variant thereof; or a combination thereof; (a-2) the N-terminus of the second polypeptide is linked to a cytokine polypeptide or a functional fragment or a functional variant thereof; the C-terminus of the second polypeptide is linked to a cytokine polypeptide or a functional fragment or a functional variant thereof; or a combination thereof; and (a-3) the N-terminus of the third polypeptide is linked to a cytokine polypeptide or a functional fragment or a functional variant thereof; the C-terminus of the third polypeptide is linked to a cytokine polypeptide or a functional fragment or a functional variant thereof; or a combination thereof; (b-1) the N-terminus of the first polypeptide is linked a cytokine polypeptide or a functional fragment or a functional variant thereof; the C-terminus of the first polypeptide is linked to a cytokine polypeptide or a functional fragment or a functional variant thereof; or a combination thereof; (b-2) the N-terminus of the second polypeptide is linked to a cytokine polypeptide or a functional fragment or a functional variant thereof; the C-terminus of the second polypeptide is linked to a cytokine polypeptide or a functional fragment or a functional variant thereof; or a combination thereof; and (b-3) the N-terminus of the fourth polypeptide is linked to a cytokine polypeptide or a functional fragment or a functional variant thereof; the C-terminus of the fourth polypeptide is linked to a cytokine polypeptide or a functional fragment or a functional variant thereof; or a combination thereof; or (c-1) the N-terminus of the second polypeptide is linked to a cytokine polypeptide or a functional fragment or a functional variant thereof; the C-terminus of the second polypeptide is linked to a cytokine polypeptide or a functional fragment or a functional variant thereof; or a combination thereof; (c-2) the N-terminus of the third polypeptide is linked to a cytokine polypeptide or a functional fragment or a functional variant thereof; the C-terminus of the third polypeptide is linked to a cytokine polypeptide or a functional fragment or a functional variant thereof; or a combination thereof; and (c-3) the N-terminus of the fourth polypeptide is linked to a cytokine polypeptide or a functional fragment or a functional variant thereof; the C-terminus of the fourth polypeptide is linked to a cytokine polypeptide or a functional fragment or a functional variant thereof; or a combination thereof.

[0023] In some embodiments, the N-terminus of the first polypeptide is linked to a cytokine polypeptide or a functional fragment or a functional variant thereof; the C-terminus of the first polypeptide is linked to a cytokine polypeptide or a functional fragment or a functional variant thereof; or a combination thereof; the N-terminus of the second polypeptide is linked to a cytokine polypeptide or a functional fragment or a functional variant thereof; the C-terminus of the second polypeptide is linked to a cytokine polypeptide or a functional fragment or a functional variant thereof; or a combination thereof; the N-terminus of the third polypeptide is linked to a cytokine polypeptide or a functional fragment or a functional variant thereof; the C-terminus of the third polypeptide is linked to a cytokine polypeptide or a functional fragment or a functional variant thereof; or a combination thereof; and the N-terminus of the fourth polypeptide is linked to a cytokine polypeptide or a functional fragment or a functional variant thereof; the C-terminus of the fourth polypeptide is linked to a cytokine polypeptide or a functional fragment or a functional variant thereof; or a combination thereof.

[0024] In some embodiments, the cytokine polypeptide or a functional fragment or a functional variant thereof is within a single contiguous polypeptide chain of the first polypeptide, the second polypeptide, the third cytokine polypeptide, or the fourth cytokine polypeptide to which the cytokine polypeptide or a functional fragment or a functional variant thereof is linked.

[0025] In some embodiments, the multifunctional polypeptide molecule further comprises: (i) a linker between the first portion of the dimerization module and the first TCRβV-binding moiety comprising the first VH and the first VL or the single domain antibody, or the first portion of the first TCRβV-binding moiety comprising the VH of the first TCRβV-binding moiety; (ii) a linker between the second portion of the dimerization module and the second TCRβV-binding moiety comprising the second VH and the second VL or the single domain antibody, or the first portion of the second TCRβV-binding moiety comprising the VH of the second TCRβV-binding moiety; (iii) a linker between the first VH and the first VL; (iv) a linker between the second VH and the second VL; (v) a linker between the first CH1 and the first VH, or the VH of the first TCRβV-binding moiety; (vi) a linker between the second CH1 and the second VH, or the VH of the second TCRβV-binding moiety; (vii) a linker between the first CL and the first VL, or the VL of the first TCRβV-binding moiety; (vii) a linker between the second CL and the second VL, or the VL of the second TCRβV-binding moiety; (viii) a linker between the at least one cytokine polypeptide or a functional fragment or a functional variant thereof and the first polypeptide, a linker between the at least one cytokine polypeptide or a functional fragment or a functional variant thereof and the second polypeptide, a linker between the at least one cytokine polypeptide or a functional fragment or a functional variant thereof and the third polypeptide, a linker between the at least one cytokine polypeptide or a functional fragment or a functional variant thereof and the fourth polypeptide, or a combination thereof; or (ix) a combination thereof.

[0026] In some embodiments, the linker is selected from the group consisting of a cleavable linker, a non-cleavable linker, a peptide linker, a flexible linker, a rigid linker, a helical linker, and a non-helical linker.

[0027] In some embodiments, the linker is the peptide linker and the linker comprises the sequence of SEQ ID NO: 3308 or SEQ ID NO: 3643.

[0028] In some embodiments, the multifunctional polypeptide molecule is an isolated multifunctional polypeptide molecule.

[0029] In some embodiments, the multifunctional polypeptide molecule comprises: (i) the first polypeptide comprising the first portion of the dimerization module linked to the C-terminus of the first portion of the first TCRβV-binding moiety; (ii) the second polypeptide comprising the second portion of the dimerization module; (iii) the third polypeptide comprising the second portion of the first TCRβV-binding moiety; and (iv) a cytokine polypeptide or a functional fragment or a functional variant thereof covalently linked to the N-terminus of the second polypeptide, wherein the multifunctional polypeptide molecule comprises a single TCRβV-binding moiety.

[0030] In some embodiments, the multifunctional polypeptide molecule comprises: (i) the first polypeptide comprising the first portion of the dimerization module linked to the C-terminus of the first portion of the first TCRβV-binding moiety; (ii) the second polypeptide comprising the second portion of the dimerization module linked to the C-terminus of the first portion of the second TCRβV-binding moiety; (iii) the third polypeptide comprising the second portion of the first TCRβV-binding moiety; (iv) the fourth polypeptide comprising the second portion of the second TCRβV-binding moiety; (v) a cytokine polypeptide or a functional fragment or a functional variant thereof covalently linked to the C-terminus of the third polypeptide, and (vi) a cytokine polypeptide or a functional fragment or a functional variant thereof covalently linked to the C-terminus of the fourth polypeptide.

[0031] In some embodiments, the multifunctional polypeptide molecule comprises: (i) the first polypeptide comprising the first portion of the dimerization module linked to the C-terminus of the first portion of the first TCRβV-binding moiety; (ii) the second polypeptide comprising the second portion of the dimerization module linked to the C-terminus of the first portion of the second TCRβV-binding moiety; (iii) the third polypeptide comprising the second portion of the first TCRβV-binding moiety; (iv) the fourth polypeptide comprising the second portion of the second TCRβV-binding moiety; and (v) a cytokine polypeptide or a functional fragment or a functional variant thereof covalently linked to the C-terminus of the third polypeptide or the C-terminus of the fourth polypeptide, but not to both.

[0032] In some embodiments, the multifunctional polypeptide molecule comprises: (i) the first polypeptide comprising the first portion of the dimerization module linked to the C-terminus of the first portion of the first TCRβV-binding moiety; (ii) the second polypeptide comprising the second portion of the dimerization module linked to the C-terminus of the first portion of the second TCRβV-binding moiety; (iii) the third polypeptide comprising the second portion of the first TCRβV-binding moiety; (iv) the fourth polypeptide comprising the second portion of the second TCRβV-binding moiety; and (v) a cytokine polypeptide or a functional fragment or a functional variant thereof covalently linked to the C-terminus of the first polypeptide or the C-terminus of the second polypeptide, but not to both.

[0033] In some embodiments, the first TCRβV-binding moiety, the second TCRβV-binding moiety, or a combination thereof comprises any one selected from the group consisting of a Fab, a F(ab′)2, an Fv, a single chain Fv (scFv), a single domain antibody, a diabody (dAb), a camelid antibody, and a combination thereof.

[0034] In some embodiments, the first TCRβV-binding moiety, the second TCRβV-binding moiety, or a combination thereof comprises the Fab or the scFv.

[0035] In some embodiments, the TCRβV-binding moiety is the sole antigen-binding moiety of the multifunctional polypeptide molecule.

[0036] In some embodiments, the multifunctional polypeptide molecule comprises two or more of the at least one cytokine polypeptides.

[0037] In some embodiments, the at least one cytokine polypeptide comprises interleukin-2 (IL-2) or a fragment thereof.

[0038] In some embodiments, the at least one cytokine polypeptide comprises a sequence having at least 75% sequence identity to the sequence of SEQ ID NO: 2191.

[0039] In some embodiments, the variant is an IL-2 variant comprising a substitution mutation.

[0040] In some embodiments, the variant is an IL-2 variant comprising C125A mutation.

[0041] In some embodiments, the variant comprises a sequence having at least 75% sequence identity to the sequence of SEQ ID NO: 2270.

[0042] In some embodiments, the first portion of the dimerization module comprises a first immunoglobulin constant regions (Fc regions) and the second portion of the dimerization module comprises a second Fc region.

[0043] In some embodiments, the first Fc region, the second Fc region, or a combination thereof is selected from the group consisting of an IgG1 Fc region or a fragment thereof, an IgG2 Fc region or a fragment thereof, an IgG3 Fc region or a fragment thereof, an IgGA1 Fc region or a fragment thereof, an IgGA2 Fc region or a fragment thereof, an IgG4 Fc region or a fragment thereof, an IgJ Fc region or a fragment thereof, an IgM Fc region or a fragment thereof, an IgD Fc region or a fragment thereof, and an IgE Fc region or a fragment thereof.

[0044] In some embodiments, the first Fc region, the second Fc region, or a combination thereof is selected from the group consisting of a human IgG1 Fc region or a fragment thereof, a human IgG2 Fc region or a fragment thereof, and a human IgG4 Fc region or a fragment thereof.

[0045] In some embodiments, the first Fc region, the second Fc region, or a combination thereof comprises an Fe interface with one or more of: a paired cavity-protuberance, an electrostatic interaction, or a strand-exchange, wherein the dimerization of the first Fc region and the second Fc region is enhanced as indicated by a greater ratio of heteromultimer:homomultimer forms relative to a dimerization of Fc regions with a non-engineered interface.

[0046] In some embodiments, the first Fc region, the second Fc region, or a combination thereof comprises an amino acid substitution listed in Table 14.

[0047] In some embodiments, the first Fc region, the second Fc region, or a combination thereof comprises an Asn297Ala (N297A) mutation or a Leu234Ala/Leu235Ala (LALA) mutation.

[0048] In some embodiments, the first Fc region, the second Fc region, or a combination thereof comprises a sequence having at least 75% sequence identity to the sequence of SEQ ID NO: 40, SEQ ID NO: 42, SEQ ID NO: 3645, SEQ ID NO: 3646, SEQ ID NO: 3647, SEQ ID NO:3648, or SEQ ID NO: 3649.

[0049] In some embodiments, the first TCRβV-binding moiety, the second TCRβV-binding moiety, or a combination thereof binds to one or more of a TCRβV subfamily selected from the group consisting of: (i) TCRβ V2 subfamily comprising TCRβ V2*01; (ii) TCRβ V3 subfamily comprising TCRβ V3-1*01; (iii) TCRβ V4 subfamily comprising one or more selected from TCRβ V4-1, TCRβ V4-2, and TCRβ V4-3; (iv) TCRβ V5 subfamily comprising one or more selected from TCRβ V5-6*01, TCRβ V5-4*01, TCRβ V5-1*01, and TCRβ V5-8*01; (v) the TCRβ V6 subfamily comprising one or more selected from TCRβ V6-4*01, TCRβ V6-4*02, TCRβ V6-9*01, TCRβ V6-8*01, TCRβ V6-5*01, TCRβ V6-6*02, TCRβ V6-6*01, TCRβ V6-2*01, TCRβ V6-3*01, and TCRβ V6-1*01; (vi) TCRβ V9 subfamily; (vii) TCRβ V10 subfamily comprising one or more selected from TCRβ V10-1*01, TCRβ V10-1*02, TCRβ V10-3*01, and TCRβ V10-2*01; (viii) TCRβ V11 subfamily comprising TCRβ V11-2; (ix) TCRβ V12 subfamily comprising one or more selected from TCRβ V12-4*01, TCRβ V12-3*01, and TCRβ V12-5*01; (x) TCRβ V13 subfamily comprising TCRβ V13*01; (xi) TCRβ V16 subfamily comprising TCRβ V16*01; (xii) TCRβ V19 subfamily comprising one or more selected from TCRβ V19*01 and TCRβ V19*02; (xiii) TCRβ V21 subfamily; (xiv) TCRβ V23 subfamily; (xv) TCRβ V27 subfamily; and (xvi) TCRβ V28 subfamily.

[0050] In some embodiments, the multifunctional polypeptide molecule comprises the first TCRβV-binding moiety and the second TCRβV-binding moiety, and the first TCRβV-binding moiety and the second TCRβV-binding moiety are same.

[0051] In some embodiments, the multifunctional polypeptide molecule comprises the first TCRβV-binding moiety and the second TCRβV-binding moiety, and the first TCRβV-binding moiety and the second TCRβV-binding moiety are different.

[0052] In some embodiments, the first TCRβV-binding moiety and the second TCRβV-binding moiety binds: (i) one or more of a TCRβ V6 subfamily member and one or more of a TCRβ V10 subfamily member, respectively; (ii) one or more of a TCRβ V6 subfamily member and one or more of a TCRβ V5 subfamily member, respectively; (iii) one or more of a TCRβ V6 subfamily member and one or more of a TCRβ V12 subfamily member, respectively; (iv) one or more of a TCRβ V10 subfamily member and one or more of a TCRβ V5 subfamily member, respectively; (v) one or more of a TCRβ V10 subfamily member and one or more of a TCRβ V12 subfamily member, respectively; or (vi) one or more of a TCRβ V5 subfamily member and one or more of a TCRβ V12 subfamily member, respectively.

[0053] In some embodiments, the first TCRβV-binding moiety, the second TCRβV-binding moiety, or a combination thereof comprises: (i) a HC CDR1, a HC CDR2 and a HC CDR3 of an amino acid sequence having at least 75% sequence identity to any one of the CDR1, CDR2, and CDR3 sequences listed in Table 1; (ii) a LC CDR1, a LC CDR2, and a LC CDR3 of an amino acid sequence having at least 75% sequence identity to any one of the CDR1, CDR2, and CDR3 the sequences listed in Table 1; or (iii) a combination thereof.

[0054] In some embodiments, the first TCRβV-binding moiety, the second TCRβV-binding moiety, or a combination thereof comprises: (i) a VH comprising a framework region (FR) comprising a framework 1 (FR1), a framework region 2 (FR2), a framework region 3 (FR3), and a framework region 4 (FR4) that have at least 75% sequence identity to a non-murine germline FR1, a non-murine germline FR2, a non-murine germline FR3, and a non-murine germline FR4; (ii) a VL comprising a FR comprising a FR1, a FR2, a FR3, and a FR4 that have at least 75% sequence identity to a non-murine germline FR1, a non-murine germline FR2, a non-murine germline FR3, and a non-murine germline FR4; or (iii) a combination thereof.

[0055] In some embodiments, the VH comprises the FR3 comprising (i) a Threonine at position 73 according to Kabat numbering; (ii) a Glycine a position 94 according to Kabat numbering; or (iii) a combination thereof.

[0056] In some embodiments, the VL comprises the FR1 comprising a Phenyalanine at position 10 according to Kabat numbering.

[0057] In some embodiments, the VL comprises the FR2 comprising (i) a Histidine at position 36 according to Kabat numbering; (ii) an Alanine at position 46 according to Kabat numbering; or (iii) a combination thereof.

[0058] In some embodiments, the VL comprises the FR3 comprising a Phenyalanine at position 87 according to Kabat numbering.

[0059] In some embodiments, the first TCRβV-binding moiety, the second TCRβV-binding moiety, or a combination thereof comprises: (i) a HC CDR1, a HC CDR2 and a HC CDR3 of an amino acid sequence having at least 75% sequence identity to any one of the CDR1, CDR2, and CDR3 sequences listed in Table 2; (ii) a LC CDR1, a LC CDR2, and a LC CDR3 of an amino acid sequence having at least 75% sequence identity to any one of the CDR1, CDR2, and CDR3 sequences listed in Table 2; or (iii) a combination thereof.

[0060] In some embodiments, the first TCRβV-binding moiety, the second TCRβV-binding moiety, or a combination thereof comprises: (i) a VH comprising a FR comprising a FR1, a FR2, a FR3, and a FR4 that have at least 75% sequence identity to a FR1, a FR2, a FR3, and a FR4 of a humanized B-H LC of Table 2; (ii) a VL comprising a FR comprising a FR1, a FR2, a FR3, and a FR4 that have at least 75% sequence identity to a FR1, a FR2, a FR3, and a FR4 of a humanized B-H LC of Table 2; or (iii) a combination thereof.

[0061] In some embodiments, the first TCRβV-binding moiety, the second TCRβV-binding moiety, or a combination thereof comprises: (i) a VH comprising a sequence having at least 75% sequence identity to the VH sequence of a humanized Antibody B-H listed in Table 2; (ii) a VL comprising a sequence having at least 75% sequence identity to the VL sequence of a humanized Antibody B-H listed in Table 2; or (iii) a combination thereof.

[0062] In some embodiments, the first polypeptide, the second polypeptide, or a combination thereof comprises a heavy chain constant region having a sequence having at least 75% sequence identity to any one of the sequences listed in Table 3 or a combination thereof.

[0063] In some embodiments, the first polypeptide, the second polypeptide, or a combination thereof comprises a heavy chain constant region of an IgM or a fragment thereof.

[0064] In some embodiments, the heavy chain constant region of the IgM comprises a sequence having at least 75% sequence identity to the sequence of SEQ ID NO: 73.

[0065] In some embodiments, the first polypeptide, the second polypeptide, or a combination thereof comprises a heavy chain constant region of an IgJ or a fragment thereof.

[0066] In some embodiments, the heavy chain constant region of the IgJ comprises a sequence having at least 75% sequence identity to the sequence of SEQ ID NO: 76.

[0067] In some embodiments, the first polypeptide, the second polypeptide, a combination thereof comprises a heavy chain constant region of an IgGA1 or a fragment thereof.

[0068] In some embodiments, the heavy chain constant region of the IgGA1 comprises a sequence having at least 75% sequence identity to the sequence of SEQ ID NO: 74.

[0069] In some embodiments, the first polypeptide, the second polypeptide, or a combination thereof comprises a heavy chain constant region of an IgGA2 or a fragment thereof.

[0070] In some embodiments, the heavy chain constant region of the IgGA2 comprises a sequence having at least 75% sequence identity to the sequence of SEQ ID NO: 75.

[0071] In some embodiments, the first polypeptide, the second polypeptide, or a combination thereof comprises a heavy chain constant region of an IgG1 or a fragment thereof.

[0072] In some embodiments, the heavy chain constant region of the IgG1 comprises a sequence having at least 75% sequence identity to the sequence of SEQ ID NO: 41 or SEQ ID NO: 3645.

[0073] In some embodiments, the first polypeptide, the second polypeptide, the third polypeptide, the fourth polypeptide, or a combination thereof comprises a light chain constant region having a sequence having at least 75% sequence identity to any one of the sequences listed in Table 3 or a combination thereof.

[0074] In some embodiments, the first polypeptide, the second polypeptide, the third polypeptide, the fourth polypeptide, or a combination thereof comprises a light chain constant region of a kappa chain or a fragment thereof.

[0075] In some embodiments, the light chain constant region of a kappa chain comprises a light chain constant region sequence listed in Table 3.

[0076] In some embodiments, the light chain constant region of the kappa chain comprises a sequence having at least 75% sequence identity to the sequence of SEQ ID NO: 39 or SEQ ID NO: 3644.

[0077] In some embodiments, the first TCRβV-binding moiety, the second TCRβV-binding moiety, or a combination thereof comprises: (i) a HC CDR1, a HC CDR2 and a HC CDR3 comprising amino acid sequences having at least 75% sequence identity to CDR1, CDR2, and CDR3 sequences of a VH disclosed in Tables 1, 2, 10, 11, 12 or 13; (ii) a LC CDR1, a LC CDR2, and a LC CDR3 comprising an amino acid sequence having at least 75% sequence identity to CDR1, CDR2, and CDR3 sequences of a VL disclosed in Tables 1, 2, 10, 11, 12 or 13; or (iii) a combination thereof.

[0078] In some embodiments, the first TCRβV-binding moiety, the second TCRβV-binding moiety, or a combination thereof comprises a light chain comprising a FR1 comprising: (i) an Aspartic Acid at position 1 according to Kabat numbering; (ii) an Asparagine at position 2 according to Kabat numbering; (iii) a Leucine at position 4 according to Kabat numbering; or (iv) a combination thereof.

[0079] In some embodiments, the first TCRβV-binding moiety, the second TCRβV-binding moiety, or a combination thereof comprises a light chain comprising a FR3 comprising: (i) a Glycine at position 66 according to Kabat numbering; (ii) an Asparagine at position 69 according to Kabat numbering; (iii) a Tyrosine at position 71 according to Kabat numbering; or (iv) a combination thereof.

[0080] In some embodiments, the first TCRβV-binding moiety, the second TCRβV-binding moiety, or a combination thereof binds to an outward facing region on a TCRβV protein.

[0081] In some embodiments, the outward facing region on the TCRβV protein comprises a structurally conserved region of TCRβV having a similar structure across one or more TCRβV subfamilies.

[0082] In some embodiments, the first polypeptide, the second polypeptide, or a combination thereof comprises (i) a first sequence selected from the group consisting of SEQ ID NOS: 80, 83, 86, 89, 92, 95, 98, 101, 104, 107, 110, 110, 113, 116, 119, 122, 125, 128, 131, 134, 137, 140, 143, 146, 149, 153, 156, 159, 162, 165, 168, 171, 174, 177, 180, 183, 186, 189, 192, 195, 198, 201, 204, 206, 208, 210, 212, 214, 216, 218, 220, 222, 224, 1309, 1326, 1327, 1328, 1329, 1330, 1331, 1332, 1333, 1334, 1335, 1336, 1337, 1338, 1339, 1340, 1341, 1342, 3281, and 3642; and (ii) a second sequence selected from the group consisting of SEQ ID NOS: 40, 41, 42, 73, 74, 75, 76, 3645, 3646, 3647, 3648, and 3649; wherein the first sequence is linked to the second sequence.

[0083] In some embodiments, the first polypeptide, the second polypeptide, or a combination thereof further comprises a third sequence selected from the group consisting of SEQ ID NO: 2191 and SEQ ID NO: 2270, wherein the third sequence is linked to the first sequence, the second sequence, or a combination thereof.

[0084] In some embodiments, the third sequence is linked to the N-terminus of the first sequence.

[0085] In some embodiments, the third sequence is linked to the C-terminus of the second sequence.

[0086] In some embodiments, the first polypeptide, the second polypeptide, or a combination thereof comprises (i) a first sequence selected from the group consisting of SEQ ID NOS: 1, 9, 15, 23, 25, 82, 85, 88, 91, 94, 97, 100, 103, 106, 109, 112, 115, 118, 121, 124, 127, 130, 133, 136, 139, 142, 145, 148, 151, 155, 158, 161, 164, 167, 170, 173, 176, 179, 182, 185, 188, 191, 194, 197, 200, 203, 205, 207, 209, 211, 213, 215, 217, 219, 221, 223, 225, 1100, 1310, 1311, 1312, 1344, 1346, 1348, 1350, 1356, 1360, 1362, 1370, and 3438; and (ii) a second sequence selected from the group consisting of SEQ ID NOS: 40, 41, 42, 73, 74, 75, 76, 3645, 3646, 3647, 3648, and 3649; wherein the first sequence is linked to the second sequence.

[0087] In some embodiments, the first polypeptide, the second polypeptide, or a combination thereof further comprises a third sequence selected from the group consisting of SEQ ID NO: 2191 and SEQ ID NO: 2270, wherein the third sequence is linked to the first sequence, the second sequence, or a combination thereof.

[0088] In some embodiments, the third sequence is linked to the N-terminus of the first sequence.

[0089] In some embodiments, the third sequence is linked to the C-terminus of the second sequence.

[0090] In some embodiments, the third polypeptide, the fourth polypeptide, or a combination thereof comprises (i) a fourth sequence selected from the group consisting of SEQ ID NOS: 2, 10, 11, 16, 26, 27, 28, 29, 30, 81, 84, 87, 90, 93, 96, 99, 102, 105, 108, 111, 114, 117, 120, 123, 126, 129, 132, 135, 138, 141, 144, 147, 150, 154, 157, 160, 163, 166, 169, 172, 175, 178, 181, 184, 187, 190, 193, 196, 199, 202, 1101, 1313, 1314, 1347, 1349, 1351, 1353, 1357, 1361, 1365, 1367, 1369, and 3279; and (ii) a fifth sequence selected from the group consisting of SEQ ID NOS: 39 and 3644, wherein the fourth sequence is linked to the fifth sequence.

[0091] In some embodiments, the third polypeptide, the fourth polypeptide, or a combination thereof further comprises the third sequence, wherein the third sequence is linked to the fourth sequence, the fifth sequence, or a combination thereof.

[0092] In some embodiments, the third sequence is linked to the N-terminus of the fourth sequence.

[0093] In some embodiments, the third sequence is linked to the C-terminus of the fifth sequence.

[0094] In some embodiments, the first polypeptide, the second polypeptide, or a combination thereof comprises: a first sequence of SEQ ID NO: 1 linked to a second sequence of SEQ ID NO: 40; a first sequence of SEQ ID NO: 1 linked to a second sequence of SEQ ID NO: 42; a first sequence of SEQ ID NO: 1 linked to a second sequence of SEQ ID NO: 74; a first sequence of SEQ ID NO: 1 linked to a second sequence of SEQ ID NO: 3645; a first sequence of SEQ ID NO: 1 linked to a second sequence of SEQ ID NO: 3646; a first sequence of SEQ ID NO: 1 linked to a second sequence of SEQ ID NO: 3648; a first sequence of SEQ ID NO: 1 linked to a second sequence of SEQ ID NO: 3649; a first sequence of SEQ ID NO: 9 linked to a second sequence of SEQ ID NO: 40; a first sequence of SEQ ID NO: 9 linked to a second sequence of SEQ ID NO: 42; a first sequence of SEQ ID NO: 9 linked to a second sequence of SEQ ID NO: 74; a first sequence of SEQ ID NO: 9 linked to a second sequence of SEQ ID NO: 3645; a first sequence of SEQ ID NO: 9 linked to a second sequence of SEQ ID NO: 3646; a first sequence of SEQ ID NO: 9 linked to a second sequence of SEQ ID NO: 3648; a first sequence of SEQ ID NO: 9 linked to a second sequence of SEQ ID NO: 3649; a first sequence of SEQ ID NO: 25 linked to a second sequence of SEQ ID NO: 40; a first sequence of SEQ ID NO: 25 linked to a second sequence of SEQ ID NO: 42; a first sequence of SEQ ID NO: 25 linked to a second sequence of SEQ ID NO: 74; a first sequence of SEQ ID NO: 25 linked to a second sequence of SEQ ID NO: 3645; a first sequence of SEQ ID NO: 25 linked to a second sequence of SEQ ID NO: 3646; a first sequence of SEQ ID NO: 25 linked to a second sequence of SEQ ID NO: 3648; a first sequence of SEQ ID NO: 25 linked to a second sequence of SEQ ID NO: 3649; a first sequence of SEQ ID NO: 82 linked to a second sequence of SEQ ID NO: 40; a first sequence of SEQ ID NO: 82 linked to a second sequence of SEQ ID NO: 42; a first sequence of SEQ ID NO: 82 linked to a second sequence of SEQ ID NO: 74; a first sequence of SEQ ID NO: 82 linked to a second sequence of SEQ ID NO: 3645; a first sequence of SEQ ID NO: 82 linked to a second sequence of SEQ ID NO: 3646; a first sequence of SEQ ID NO: 82 linked to a second sequence of SEQ ID NO: 3648; a first sequence of SEQ ID NO: 82 linked to a second sequence of SEQ ID NO: 3649; a first sequence of SEQ ID NO: 91 linked to a second sequence of SEQ ID NO: 40; a first sequence of SEQ ID NO: 91 linked to a second sequence of SEQ ID NO: 42; a first sequence of SEQ ID NO: 91 linked to a second sequence of SEQ ID NO: 74; a first sequence of SEQ ID NO: 91 linked to a second sequence of SEQ ID NO: 3645; a first sequence of SEQ ID NO: 91 linked to a second sequence of SEQ ID NO: 3646; a first sequence of SEQ ID NO: 91 linked to a second sequence of SEQ ID NO: 3648; a first sequence of SEQ ID NO: 91 linked to a second sequence of SEQ ID NO: 3649; a first sequence of SEQ ID NO: 103 linked to a second sequence of SEQ ID NO: 40; a first sequence of SEQ ID NO: 103 linked to a second sequence of SEQ ID NO: 42; a first sequence of SEQ ID NO: 103 linked to a second sequence of SEQ ID NO: 74; a first sequence of SEQ ID NO: 103 linked to a second sequence of SEQ ID NO: 3645; a first sequence of SEQ ID NO: 103 linked to a second sequence of SEQ ID NO: 3646; a first sequence of SEQ ID NO: 103 linked to a second sequence of SEQ ID NO: 3648; a first sequence of SEQ ID NO: 103 linked to a second sequence of SEQ ID NO: 3649; a first sequence of SEQ ID NO: 118 linked to a second sequence of SEQ ID NO: 40; a first sequence of SEQ ID NO: 118 linked to a second sequence of SEQ ID NO: 42; a first sequence of SEQ ID NO: 118 linked to a second sequence of SEQ ID NO: 74; a first sequence of SEQ ID NO: 118 linked to a second sequence of SEQ ID NO: 3645; a first sequence of SEQ ID NO: 118 linked to a second sequence of SEQ ID NO: 3646; a first sequence of SEQ ID NO: 118 linked to a second sequence of SEQ ID NO: 3648; a first sequence of SEQ ID NO: 118 linked to a second sequence of SEQ ID NO: 3649; a first sequence of SEQ ID NO: 130 linked to a second sequence of SEQ ID NO: 40; a first sequence of SEQ ID NO: 130 linked to a second sequence of SEQ ID NO: 42; a first sequence of SEQ ID NO: 130 linked to a second sequence of SEQ ID NO: 74; a first sequence of SEQ ID NO: 130 linked to a second sequence of SEQ ID NO: 3645; a first sequence of SEQ ID NO: 130 linked to a second sequence of SEQ ID NO: 3646; a first sequence of SEQ ID NO: 130 linked to a second sequence of SEQ ID NO: 3648; a first sequence of SEQ ID NO: 130 linked to a second sequence of SEQ ID NO: 3649; a first sequence of SEQ ID NO: 142 linked to a second sequence of SEQ ID NO: 40; a first sequence of SEQ ID NO: 142 linked to a second sequence of SEQ ID NO: 42; a first sequence of SEQ ID NO: 142 linked to a second sequence of SEQ ID NO: 74; a first sequence of SEQ ID NO: 142 linked to a second sequence of SEQ ID NO: 3645; a first sequence of SEQ ID NO: 142 linked to a second sequence of SEQ ID NO: 3646; a first sequence of SEQ ID NO: 142 linked to a second sequence of SEQ ID NO: 3648; a first sequence of SEQ ID NO: 142 linked to a second sequence of SEQ ID NO: 3649; a first sequence of SEQ ID NO: 151 linked to a second sequence of SEQ ID NO: 40; a first sequence of SEQ ID NO: 151 linked to a second sequence of SEQ ID NO: 42; a first sequence of SEQ ID NO: 151 linked to a second sequence of SEQ ID NO: 74; a first sequence of SEQ ID NO: 151 linked to a second sequence of SEQ ID NO: 3645; a first sequence of SEQ ID NO: 151 linked to a second sequence of SEQ ID NO: 3646; a first sequence of SEQ ID NO: 151 linked to a second sequence of SEQ ID NO: 3648; a first sequence of SEQ ID NO: 151 linked to a second sequence of SEQ ID NO: 3649; a first sequence of SEQ ID NO: 167 linked to a second sequence of SEQ ID NO: 40; a first sequence of SEQ ID NO: 167 linked to a second sequence of SEQ ID NO: 42; a first sequence of SEQ ID NO: 167 linked to a second sequence of SEQ ID NO: 74; a first sequence of SEQ ID NO: 167 linked to a second sequence of SEQ ID NO: 3645; a first sequence of SEQ ID NO: 167 linked to a second sequence of SEQ ID NO: 3646; a first sequence of SEQ ID NO: 167 linked to a second sequence of SEQ ID NO: 3648; a first sequence of SEQ ID NO: 167 linked to a second sequence of SEQ ID NO: 3649; a first sequence of SEQ ID NO: 182 linked to a second sequence of SEQ ID NO: 40; a first sequence of SEQ ID NO: 182 linked to a second sequence of SEQ ID NO: 42; a first sequence of SEQ ID NO: 182 linked to a second sequence of SEQ ID NO: 74; a first sequence of SEQ ID NO: 182 linked to a second sequence of SEQ ID NO: 3645; a first sequence of SEQ ID NO: 182 linked to a second sequence of SEQ ID NO: 3646; a first sequence of SEQ ID NO: 182 linked to a second sequence of SEQ ID NO: 3648; a first sequence of SEQ ID NO: 182 linked to a second sequence of SEQ ID NO: 3649; a first sequence of SEQ ID NO: 197 linked to a second sequence of SEQ ID NO: 40; a first sequence of SEQ ID NO: 197 linked to a second sequence of SEQ ID NO: 42; a first sequence of SEQ ID NO: 197 linked to a second sequence of SEQ ID NO: 74; a first sequence of SEQ ID NO: 197 linked to a second sequence of SEQ ID NO: 3645; a first sequence of SEQ ID NO: 197 linked to a second sequence of SEQ ID NO: 3646; a first sequence of SEQ ID NO: 197 linked to a second sequence of SEQ ID NO: 3648; a first sequence of SEQ ID NO: 197 linked to a second sequence of SEQ ID NO: 3649; a first sequence of SEQ ID NO: 203 linked to a second sequence of SEQ ID NO: 40; a first sequence of SEQ ID NO: 203 linked to a second sequence of SEQ ID NO: 42; a first sequence of SEQ ID NO: 203 linked to a second sequence of SEQ ID NO: 74; a first sequence of SEQ ID NO: 203 linked to a second sequence of SEQ ID NO: 3645; a first sequence of SEQ ID NO: 203 linked to a second sequence of SEQ ID NO: 3646; a first sequence of SEQ ID NO: 203 linked to a second sequence of SEQ ID NO: 3648; a first sequence of SEQ ID NO: 203 linked to a second sequence of SEQ ID NO: 3649; a first sequence of SEQ ID NO: 209 linked to a second sequence of SEQ ID NO: 40; a first sequence of SEQ ID NO: 209 linked to a second sequence of SEQ ID NO: 42; a first sequence of SEQ ID NO: 209 linked to a second sequence of SEQ ID NO: 74; a first sequence of SEQ ID NO: 209 linked to a second sequence of SEQ ID NO: 3645; a first sequence of SEQ ID NO: 209 linked to a second sequence of SEQ ID NO: 3646; a first sequence of SEQ ID NO: 209 linked to a second sequence of SEQ ID NO: 3648; a first sequence of SEQ ID NO: 209 linked to a second sequence of SEQ ID NO: 3649; a first sequence of SEQ ID NO: 215 linked to a second sequence of SEQ ID NO: 40; a first sequence of SEQ ID NO: 215 linked to a second sequence of SEQ ID NO: 42; a first sequence of SEQ ID NO: 215 linked to a second sequence of SEQ ID NO: 74; a first sequence of SEQ ID NO: 215 linked to a second sequence of SEQ ID NO: 3645; a first sequence of SEQ ID NO: 215 linked to a second sequence of SEQ ID NO: 3646; a first sequence of SEQ ID NO: 215 linked to a second sequence of SEQ ID NO: 3648; a first sequence of SEQ ID NO: 215 linked to a second sequence of SEQ ID NO: 3649; a first sequence of SEQ ID NO: 221 linked to a second sequence of SEQ ID NO: 40; a first sequence of SEQ ID NO: 221 linked to a second sequence of SEQ ID NO: 42; a first sequence of SEQ ID NO: 221 linked to a second sequence of SEQ ID NO: 74; a first sequence of SEQ ID NO: 221 linked to a second sequence of SEQ ID NO: 3645; a first sequence of SEQ ID NO: 221 linked to a second sequence of SEQ ID NO: 3646; a first sequence of SEQ ID NO: 221 linked to a second sequence of SEQ ID NO: 3648; a first sequence of SEQ ID NO: 221 linked to a second sequence of SEQ ID NO: 3649; a first sequence of SEQ ID NO: 1100 linked to a second sequence of SEQ ID NO: 40; a first sequence of SEQ ID NO: 1100 linked to a second sequence of SEQ ID NO: 42; a first sequence of SEQ ID NO: 1100 linked to a second sequence of SEQ ID NO: 74; a first sequence of SEQ ID NO: 1100 linked to a second sequence of SEQ ID NO: 3645; a first sequence of SEQ ID NO: 1100 linked to a second sequence of SEQ ID NO: 3646; a first sequence of SEQ ID NO: 1100 linked to a second sequence of SEQ ID NO: 3648; a first sequence of SEQ ID NO: 1100 linked to a second sequence of SEQ ID NO: 3649; a first sequence of SEQ ID NO: 1310 linked to a second sequence of SEQ ID NO: 40; a first sequence of SEQ ID NO: 1310 linked to a second sequence of SEQ ID NO: 42; a first sequence of SEQ ID NO: 1310 linked to a second sequence of SEQ ID NO: 74; a first sequence of SEQ ID NO: 1310 linked to a second sequence of SEQ ID NO: 3645; a first sequence of SEQ ID NO: 1310 linked to a second sequence of SEQ ID NO: 3646; a first sequence of SEQ ID NO: 1310 linked to a second sequence of SEQ ID NO: 3648; a first sequence of SEQ ID NO: 1310 linked to a second sequence of SEQ ID NO: 3649; a first sequence of SEQ ID NO: 1346 linked to a second sequence of SEQ ID NO: 40; a first sequence of SEQ ID NO: 1346 linked to a second sequence of SEQ ID NO: 42; a first sequence of SEQ ID NO: 1346 linked to a second sequence of SEQ ID NO: 74; a first sequence of SEQ ID NO: 1346 linked to a second sequence of SEQ ID NO: 3645; a first sequence of SEQ ID NO: 1346 linked to a second sequence of SEQ ID NO: 3646; a first sequence of SEQ ID NO: 1346 linked to a second sequence of SEQ ID NO: 3648; a first sequence of SEQ ID NO: 1346 linked to a second sequence of SEQ ID NO: 3649; a first sequence of SEQ ID NO: 1350 linked to a second sequence of SEQ ID NO: 40; a first sequence of SEQ ID NO: 1350 linked to a second sequence of SEQ ID NO: 42; a first sequence of SEQ ID NO: 1350 linked to a second sequence of SEQ ID NO: 74; a first sequence of SEQ ID NO: 1350 linked to a second sequence of SEQ ID NO: 3645; a first sequence of SEQ ID NO: 1350 linked to a second sequence of SEQ ID NO: 3646; a first sequence of SEQ ID NO: 1350 linked to a second sequence of SEQ ID NO: 3648; a first sequence of SEQ ID NO: 1350 linked to a second sequence of SEQ ID NO: 3649; a first sequence of SEQ ID NO: 1360 linked to a second sequence of SEQ ID NO: 40; a first sequence of SEQ ID NO: 1360 linked to a second sequence of SEQ ID NO: 42; a first sequence of SEQ ID NO: 1360 linked to a second sequence of SEQ ID NO: 74; a first sequence of SEQ ID NO: 1360 linked to a second sequence of SEQ ID NO: 3645; a first sequence of SEQ ID NO: 1360 linked to a second sequence of SEQ ID NO: 3646; a first sequence of SEQ ID NO: 1360 linked to a second sequence of SEQ ID NO: 3648; a first sequence of SEQ ID NO: 1360 linked to a second sequence of SEQ ID NO: 3649; a first sequence of SEQ ID NO: 1370 linked to a second sequence of SEQ ID NO: 40; a first sequence of SEQ ID NO: 1370 linked to a second sequence of SEQ ID NO: 42; a first sequence of SEQ ID NO: 1370 linked to a second sequence of SEQ ID NO: 74; a first sequence of SEQ ID NO: 1370 linked to a second sequence of SEQ ID NO: 3645; a first sequence of SEQ ID NO: 1370 linked to a second sequence of SEQ ID NO: 3646; a first sequence of SEQ ID NO: 1370 linked to a second sequence of SEQ ID NO: 3648; or a first sequence of SEQ ID NO: 1370 linked to a second sequence of SEQ ID NO: 3649.

[0095] In some embodiments, the first polypeptide, the second polypeptide, or a combination thereof further comprises a third sequence selected from the group consisting of SEQ ID NO: 2191 and SEQ ID NO: 2270, wherein the third sequence is linked to the first sequence, the second sequence, or a combination thereof.

[0096] In some embodiments, the third sequence is linked to the N-terminus of the first sequence.

[0097] In some embodiments, the third sequence is linked to the C-terminus of the second sequence.

[0098] In some embodiments, the third polypeptide, the fourth polypeptide, or a combination thereof comprises: a fourth sequence of SEQ ID NO: 2 linked to a fifth sequence of SEQ ID NO: 3644; a fourth sequence of SEQ ID NO: 2 linked to a fifth sequence of SEQ ID NO: 39; a fourth sequence of SEQ ID NO: 10 linked to a fifth sequence of SEQ ID NO: 3644; a fourth sequence of SEQ ID NO: 10 linked to a fifth sequence of SEQ ID NO: 39; a fourth sequence of SEQ ID NO: 16 linked to a fifth sequence of SEQ ID NO: 3644; a fourth sequence of SEQ ID NO: 16 linked to a fifth sequence of SEQ ID NO: 39; a fourth sequence of SEQ ID NO: 28 linked to a fifth sequence of SEQ ID NO: 3644; a fourth sequence of SEQ ID NO: 28 linked to a fifth sequence of SEQ ID NO: 39; a fourth sequence of SEQ ID NO: 87 linked to a fifth sequence of SEQ ID NO: 3644; a fourth sequence of SEQ ID NO: 87 linked to a fifth sequence of SEQ ID NO: 39; a fourth sequence of SEQ ID NO: 90 linked to a fifth sequence of SEQ ID NO: 3644; a fourth sequence of SEQ ID NO: 90 linked to a fifth sequence of SEQ ID NO: 39; a fourth sequence of SEQ ID NO: 96 linked to a fifth sequence of SEQ ID NO: 3644; a fourth sequence of SEQ ID NO: 96 linked to a fifth sequence of SEQ ID NO: 39; a fourth sequence of SEQ ID NO: 105 linked to a fifth sequence of SEQ ID NO: 3644; a fourth sequence of SEQ ID NO: 105 linked to a fifth sequence of SEQ ID NO: 39; a fourth sequence of SEQ ID NO: 117 linked to a fifth sequence of SEQ ID NO: 3644; a fourth sequence of SEQ ID NO: 117 linked to a fifth sequence of SEQ ID NO: 39; a fourth sequence of SEQ ID NO: 120 linked to a fifth sequence of SEQ ID NO: 3644; a fourth sequence of SEQ ID NO: 120 linked to a fifth sequence of SEQ ID NO: 39; a fourth sequence of SEQ ID NO: 129 linked to a fifth sequence of SEQ ID NO: 3644; a fourth sequence of SEQ ID NO: 129 linked to a fifth sequence of SEQ ID NO: 39; a fourth sequence of SEQ ID NO: 132 linked to a fifth sequence of SEQ ID NO: 3644; a fourth sequence of SEQ ID NO: 132 linked to a fifth sequence of SEQ ID NO: 39; a fourth sequence of SEQ ID NO: 141 linked to a fifth sequence of SEQ ID NO: 3644; a fourth sequence of SEQ ID NO: 141 linked to a fifth sequence of SEQ ID NO: 39; a fourth sequence of SEQ ID NO: 150 linked to a fifth sequence of SEQ ID NO: 3644; a fourth sequence of SEQ ID NO: 150 linked to a fifth sequence of SEQ ID NO: 39; a fourth sequence of SEQ ID NO: 154 linked to a fifth sequence of SEQ ID NO: 3644; a fourth sequence of SEQ ID NO: 154 linked to a fifth sequence of SEQ ID NO: 39; a fourth sequence of SEQ ID NO: 163 linked to a fifth sequence of SEQ ID NO: 3644; a fourth sequence of SEQ ID NO: 163 linked to a fifth sequence of SEQ ID NO: 39; a fourth sequence of SEQ ID NO: 169 linked to a fifth sequence of SEQ ID NO: 3644; a fourth sequence of SEQ ID NO: 169 linked to a fifth sequence of SEQ ID NO: 39; a fourth sequence of SEQ ID NO: 175 linked to a fifth sequence of SEQ ID NO: 3644; a fourth sequence of SEQ ID NO: 175 linked to a fifth sequence of SEQ ID NO: 39; a fourth sequence of SEQ ID NO: 181 linked to a fifth sequence of SEQ ID NO: 3644; a fourth sequence of SEQ ID NO: 181 linked to a fifth sequence of SEQ ID NO: 39; a fourth sequence of SEQ ID NO: 187 linked to a fifth sequence of SEQ ID NO: 3644; a fourth sequence of SEQ ID NO: 187 linked to a fifth sequence of SEQ ID NO: 39; a fourth sequence of SEQ ID NO: 193 linked to a fifth sequence of SEQ ID NO: 3644; a fourth sequence of SEQ ID NO: 193 linked to a fifth sequence of SEQ ID NO: 39; a fourth sequence of SEQ ID NO: 202 linked to a fifth sequence of SEQ ID NO: 3644; a fourth sequence of SEQ ID NO: 202 linked to a fifth sequence of SEQ ID NO: 39; a fourth sequence of SEQ ID NO: 1101 linked to a fifth sequence of SEQ ID NO: 3644; a fourth sequence of SEQ ID NO: 1101 linked to a fifth sequence of SEQ ID NO: 39; a fourth sequence of SEQ ID NO: 1349 linked to a fifth sequence of SEQ ID NO: 3644; a fourth sequence of SEQ ID NO: 1349 linked to a fifth sequence of SEQ ID NO: 39; a fourth sequence of SEQ ID NO: 1313 linked to a fifth sequence of SEQ ID NO: 3644; a fourth sequence of SEQ ID NO: 1313 linked to a fifth sequence of SEQ ID NO: 39; a fourth sequence of SEQ ID NO: 1361 linked to a fifth sequence of SEQ ID NO: 3644; a fourth sequence of SEQ ID NO: 1361 linked to a fifth sequence of SEQ ID NO: 39; a fourth sequence of SEQ ID NO: 1367 linked to a fifth sequence of SEQ ID NO: 3644; a fourth sequence of SEQ ID NO: 1367 linked to a fifth sequence of SEQ ID NO: 39; a fourth sequence of SEQ ID NO: 1367 linked to a fifth sequence of SEQ ID NO: 3644; a fourth sequence of SEQ ID NO: 1367 linked to a fifth sequence of SEQ ID NO: 39; a fourth sequence of SEQ ID NO: 3279 linked to a fifth sequence of SEQ ID NO: 3644; or a fourth sequence of SEQ ID NO: 3279 linked to a fifth sequence of SEQ ID NO: 39.

[0099] In some embodiments, the third polypeptide, the fourth polypeptide, or a combination thereof further comprises the third sequence, wherein the third sequence is linked to the fourth sequence, the fifth sequence, or a combination thereof.

[0100] In some embodiments, the third sequence is linked to the N-terminus of the fourth sequence.

[0101] In some embodiments, the third sequence is linked to the C-terminus of the fifth sequence.

[0102] In some embodiments, the first polypeptide comprises: a first sequence of SEQ ID NO: 1 linked to a second sequence of SEQ ID NO: 40; a first sequence of SEQ ID NO: 1 linked to a second sequence of SEQ ID NO: 42; a first sequence of SEQ ID NO: 1 linked to a second sequence of SEQ ID NO: 74; a first sequence of SEQ ID NO: 1 linked to a second sequence of SEQ ID NO: 3645; a first sequence of SEQ ID NO: 1 linked to a second sequence of SEQ ID NO: 3646; a first sequence of SEQ ID NO: 1 linked to a second sequence of SEQ ID NO: 3648; a first sequence of SEQ ID NO: 1 linked to a second sequence of SEQ ID NO: 3649; a first sequence of SEQ ID NO: 9 linked to a second sequence of SEQ ID NO: 40; a first sequence of SEQ ID NO: 9 linked to a second sequence of SEQ ID NO: 42; a first sequence of SEQ ID NO: 9 linked to a second sequence of SEQ ID NO: 74; a first sequence of SEQ ID NO: 9 linked to a second sequence of SEQ ID NO: 3645; a first sequence of SEQ ID NO: 9 linked to a second sequence of SEQ ID NO: 3646; a first sequence of SEQ ID NO: 9 linked to a second sequence of SEQ ID NO: 3648; a first sequence of SEQ ID NO: 9 linked to a second sequence of SEQ ID NO: 3649; a first sequence of SEQ ID NO: 25 linked to a second sequence of SEQ ID NO: 40; a first sequence of SEQ ID NO: 25 linked to a second sequence of SEQ ID NO: 42; a first sequence of SEQ ID NO: 25 linked to a second sequence of SEQ ID NO: 74; a first sequence of SEQ ID NO: 25 linked to a second sequence of SEQ ID NO: 3645; a first sequence of SEQ ID NO: 25 linked to a second sequence of SEQ ID NO: 3646; a first sequence of SEQ ID NO: 25 linked to a second sequence of SEQ ID NO: 3648; a first sequence of SEQ ID NO: 25 linked to a second sequence of SEQ ID NO: 3649; a first sequence of SEQ ID NO: 82 linked to a second sequence of SEQ ID NO: 40; a first sequence of SEQ ID NO: 82 linked to a second sequence of SEQ ID NO: 42; a first sequence of SEQ ID NO: 82 linked to a second sequence of SEQ ID NO: 74; a first sequence of SEQ ID NO: 82 linked to a second sequence of SEQ ID NO: 3645; a first sequence of SEQ ID NO: 82 linked to a second sequence of SEQ ID NO: 3646; a first sequence of SEQ ID NO: 82 linked to a second sequence of SEQ ID NO: 3648; a first sequence of SEQ ID NO: 82 linked to a second sequence of SEQ ID NO: 3649; a first sequence of SEQ ID NO: 91 linked to a second sequence of SEQ ID NO: 40; a first sequence of SEQ ID NO: 91 linked to a second sequence of SEQ ID NO: 42; a first sequence of SEQ ID NO: 91 linked to a second sequence of SEQ ID NO: 74; a first sequence of SEQ ID NO: 91 linked to a second sequence of SEQ ID NO: 3645; a first sequence of SEQ ID NO: 91 linked to a second sequence of SEQ ID NO: 3646; a first sequence of SEQ ID NO: 91 linked to a second sequence of SEQ ID NO: 3648; a first sequence of SEQ ID NO: 91 linked to a second sequence of SEQ ID NO: 3649; a first sequence of SEQ ID NO: 103 linked to a second sequence of SEQ ID NO: 40; a first sequence of SEQ ID NO: 103 linked to a second sequence of SEQ ID NO: 42; a first sequence of SEQ ID NO: 103 linked to a second sequence of SEQ ID NO: 74; a first sequence of SEQ ID NO: 103 linked to a second sequence of SEQ ID NO: 3645; a first sequence of SEQ ID NO: 103 linked to a second sequence of SEQ ID NO: 3646; a first sequence of SEQ ID NO: 103 linked to a second sequence of SEQ ID NO: 3648; a first sequence of SEQ ID NO: 103 linked to a second sequence of SEQ ID NO: 3649; a first sequence of SEQ ID NO: 118 linked to a second sequence of SEQ ID NO: 40; a first sequence of SEQ ID NO: 118 linked to a second sequence of SEQ ID NO: 42; a first sequence of SEQ ID NO: 118 linked to a second sequence of SEQ ID NO: 74; a first sequence of SEQ ID NO: 118 linked to a second sequence of SEQ ID NO: 3645; a first sequence of SEQ ID NO: 118 linked to a second sequence of SEQ ID NO: 3646; a first sequence of SEQ ID NO: 118 linked to a second sequence of SEQ ID NO: 3648; a first sequence of SEQ ID NO: 118 linked to a second sequence of SEQ ID NO: 3649; a first sequence of SEQ ID NO: 130 linked to a second sequence of SEQ ID NO: 40; a first sequence of SEQ ID NO: 130 linked to a second sequence of SEQ ID NO: 42; a first sequence of SEQ ID NO: 130 linked to a second sequence of SEQ ID NO: 74; a first sequence of SEQ ID NO: 130 linked to a second sequence of SEQ ID NO: 3645; a first sequence of SEQ ID NO: 130 linked to a second sequence of SEQ ID NO: 3646; a first sequence of SEQ ID NO: 130 linked to a second sequence of SEQ ID NO: 3648; a first sequence of SEQ ID NO: 130 linked to a second sequence of SEQ ID NO: 3649; a first sequence of SEQ ID NO: 142 linked to a second sequence of SEQ ID NO: 40; a first sequence of SEQ ID NO: 142 linked to a second sequence of SEQ ID NO: 42; a first sequence of SEQ ID NO: 142 linked to a second sequence of SEQ ID NO: 74; a first sequence of SEQ ID NO: 142 linked to a second sequence of SEQ ID NO: 3645; a first sequence of SEQ ID NO: 142 linked to a second sequence of SEQ ID NO: 3646; a first sequence of SEQ ID NO: 142 linked to a second sequence of SEQ ID NO: 3648; a first sequence of SEQ ID NO: 142 linked to a second sequence of SEQ ID NO: 3649; a first sequence of SEQ ID NO: 151 linked to a second sequence of SEQ ID NO: 40; a first sequence of SEQ ID NO: 151 linked to a second sequence of SEQ ID NO: 42; a first sequence of SEQ ID NO: 151 linked to a second sequence of SEQ ID NO: 74; a first sequence of SEQ ID NO: 151 linked to a second sequence of SEQ ID NO: 3645; a first sequence of SEQ ID NO: 151 linked to a second sequence of SEQ ID NO: 3646; a first sequence of SEQ ID NO: 151 linked to a second sequence of SEQ ID NO: 3648; a first sequence of SEQ ID NO: 151 linked to a second sequence of SEQ ID NO: 3649; a first sequence of SEQ ID NO: 167 linked to a second sequence of SEQ ID NO: 40; a first sequence of SEQ ID NO: 167 linked to a second sequence of SEQ ID NO: 42; a first sequence of SEQ ID NO: 167 linked to a second sequence of SEQ ID NO: 74; a first sequence of SEQ ID NO: 167 linked to a second sequence of SEQ ID NO: 3645; a first sequence of SEQ ID NO: 167 linked to a second sequence of SEQ ID NO: 3646; a first sequence of SEQ ID NO: 167 linked to a second sequence of SEQ ID NO: 3648; a first sequence of SEQ ID NO: 167 linked to a second sequence of SEQ ID NO: 3649; a first sequence of SEQ ID NO: 182 linked to a second sequence of SEQ ID NO: 40; a first sequence of SEQ ID NO: 182 linked to a second sequence of SEQ ID NO: 42; a first sequence of SEQ ID NO: 182 linked to a second sequence of SEQ ID NO: 74; a first sequence of SEQ ID NO: 182 linked to a second sequence of SEQ ID NO: 3645; a first sequence of SEQ ID NO: 182 linked to a second sequence of SEQ ID NO: 3646; a first sequence of SEQ ID NO: 182 linked to a second sequence of SEQ ID NO: 3648; a first sequence of SEQ ID NO: 182 linked to a second sequence of SEQ ID NO: 3649; a first sequence of SEQ ID NO: 197 linked to a second sequence of SEQ ID NO: 40; a first sequence of SEQ ID NO: 197 linked to a second sequence of SEQ ID NO: 42; a first sequence of SEQ ID NO: 197 linked to a second sequence of SEQ ID NO: 74; a first sequence of SEQ ID NO: 197 linked to a second sequence of SEQ ID NO: 3645; a first sequence of SEQ ID NO: 197 linked to a second sequence of SEQ ID NO: 3646; a first sequence of SEQ ID NO: 197 linked to a second sequence of SEQ ID NO: 3648; a first sequence of SEQ ID NO: 197 linked to a second sequence of SEQ ID NO: 3649; a first sequence of SEQ ID NO: 203 linked to a second sequence of SEQ ID NO: 40; a first sequence of SEQ ID NO: 203 linked to a second sequence of SEQ ID NO: 42; a first sequence of SEQ ID NO: 203 linked to a second sequence of SEQ ID NO: 74; a first sequence of SEQ ID NO: 203 linked to a second sequence of SEQ ID NO: 3645; a first sequence of SEQ ID NO: 203 linked to a second sequence of SEQ ID NO: 3646; a first sequence of SEQ ID NO: 203 linked to a second sequence of SEQ ID NO: 3648; a first sequence of SEQ ID NO: 203 linked to a second sequence of SEQ ID NO: 3649; a first sequence of SEQ ID NO: 209 linked to a second sequence of SEQ ID NO: 40; a first sequence of SEQ ID NO: 209 linked to a second sequence of SEQ ID NO: 42; a first sequence of SEQ ID NO: 209 linked to a second sequence of SEQ ID NO: 74; a first sequence of SEQ ID NO: 209 linked to a second sequence of SEQ ID NO: 3645; a first sequence of SEQ ID NO: 209 linked to a second sequence of SEQ ID NO: 3646; a first sequence of SEQ ID NO: 209 linked to a second sequence of SEQ ID NO: 3648; a first sequence of SEQ ID NO: 209 linked to a second sequence of SEQ ID NO: 3649; a first sequence of SEQ ID NO: 215 linked to a second sequence of SEQ ID NO: 40; a first sequence of SEQ ID NO: 215 linked to a second sequence of SEQ ID NO: 42; a first sequence of SEQ ID NO: 215 linked to a second sequence of SEQ ID NO: 74; a first sequence of SEQ ID NO: 215 linked to a second sequence of SEQ ID NO: 3645; a first sequence of SEQ ID NO: 215 linked to a second sequence of SEQ ID NO: 3646; a first sequence of SEQ ID NO: 215 linked to a second sequence of SEQ ID NO: 3648; a first sequence of SEQ ID NO: 215 linked to a second sequence of SEQ ID NO: 3649; a first sequence of SEQ ID NO: 221 linked to a second sequence of SEQ ID NO: 40; a first sequence of SEQ ID NO: 221 linked to a second sequence of SEQ ID NO: 42; a first sequence of SEQ ID NO: 221 linked to a second sequence of SEQ ID NO: 74; a first sequence of SEQ ID NO: 221 linked to a second sequence of SEQ ID NO: 3645; a first sequence of SEQ ID NO: 221 linked to a second sequence of SEQ ID NO: 3646; a first sequence of SEQ ID NO: 221 linked to a second sequence of SEQ ID NO: 3648; a first sequence of SEQ ID NO: 221 linked to a second sequence of SEQ ID NO: 3649; a first sequence of SEQ ID NO: 1100 linked to a second sequence of SEQ ID NO: 40; a first sequence of SEQ ID NO: 1100 linked to a second sequence of SEQ ID NO: 42; a first sequence of SEQ ID NO: 1100 linked to a second sequence of SEQ ID NO: 74; a first sequence of SEQ ID NO: 1100 linked to a second sequence of SEQ ID NO: 3645; a first sequence of SEQ ID NO: 1100 linked to a second sequence of SEQ ID NO: 3646; a first sequence of SEQ ID NO: 1100 linked to a second sequence of SEQ ID NO: 3648; a first sequence of SEQ ID NO: 1100 linked to a second sequence of SEQ ID NO: 3649; a first sequence of SEQ ID NO: 1310 linked to a second sequence of SEQ ID NO: 40; a first sequence of SEQ ID NO: 1310 linked to a second sequence of SEQ ID NO: 42; a first sequence of SEQ ID NO: 1310 linked to a second sequence of SEQ ID NO: 74; a first sequence of SEQ ID NO: 1310 linked to a second sequence of SEQ ID NO: 3645; a first sequence of SEQ ID NO: 1310 linked to a second sequence of SEQ ID NO: 3646; a first sequence of SEQ ID NO: 1310 linked to a second sequence of SEQ ID NO: 3648; a first sequence of SEQ ID NO: 1310 linked to a second sequence of SEQ ID NO: 3649; a first sequence of SEQ ID NO: 1346 linked to a second sequence of SEQ ID NO: 40; a first sequence of SEQ ID NO: 1346 linked to a second sequence of SEQ ID NO: 42; a first sequence of SEQ ID NO: 1346 linked to a second sequence of SEQ ID NO: 74; a first sequence of SEQ ID NO: 1346 linked to a second sequence of SEQ ID NO: 3645; a first sequence of SEQ ID NO: 1346 linked to a second sequence of SEQ ID NO: 3646; a first sequence of SEQ ID NO: 1346 linked to a second sequence of SEQ ID NO: 3648; a first sequence of SEQ ID NO: 1346 linked to a second sequence of SEQ ID NO: 3649; a first sequence of SEQ ID NO: 1350 linked to a second sequence of SEQ ID NO: 40; a first sequence of SEQ ID NO: 1350 linked to a second sequence of SEQ ID NO: 42; a first sequence of SEQ ID NO: 1350 linked to a second sequence of SEQ ID NO: 74; a first sequence of SEQ ID NO: 1350 linked to a second sequence of SEQ ID NO: 3645; a first sequence of SEQ ID NO: 1350 linked to a second sequence of SEQ ID NO: 3646; a first sequence of SEQ ID NO: 1350 linked to a second sequence of SEQ ID NO: 3648; a first sequence of SEQ ID NO: 1350 linked to a second sequence of SEQ ID NO: 3649; a first sequence of SEQ ID NO: 1360 linked to a second sequence of SEQ ID NO: 40; a first sequence of SEQ ID NO: 1360 linked to a second sequence of SEQ ID NO: 42; a first sequence of SEQ ID NO: 1360 linked to a second sequence of SEQ ID NO: 74; a first sequence of SEQ ID NO: 1360 linked to a second sequence of SEQ ID NO: 3645; a first sequence of SEQ ID NO: 1360 linked to a second sequence of SEQ ID NO: 3646; a first sequence of SEQ ID NO: 1360 linked to a second sequence of SEQ ID NO: 3648; a first sequence of SEQ ID NO: 1360 linked to a second sequence of SEQ ID NO: 3649; a first sequence of SEQ ID NO: 1370 linked to a second sequence of SEQ ID NO: 40; a first sequence of SEQ ID NO: 1370 linked to a second sequence of SEQ ID NO: 42; a first sequence of SEQ ID NO: 1370 linked to a second sequence of SEQ ID NO: 74; a first sequence of SEQ ID NO: 1370 linked to a second sequence of SEQ ID NO: 3645; a first sequence of SEQ ID NO: 1370 linked to a second sequence of SEQ ID NO: 3646; a first sequence of SEQ ID NO: 1370 linked to a second sequence of SEQ ID NO: 3648; or a first sequence of SEQ ID NO: 1370 linked to a second sequence of SEQ ID NO: 3649.

[0103] In some embodiments, the second polypeptide comprises: the sequence of SEQ ID NO: 2191 linked to the sequence of SEQ ID NO: 40; the sequence of SEQ ID NO: 2191 linked to the sequence of SEQ ID NO: 42; the sequence of SEQ ID NO: 2191 linked to the sequence of SEQ ID NO: 74; the sequence of SEQ ID NO: 2191 linked to the sequence of SEQ ID NO: 3645; the sequence of SEQ ID NO: 2191 linked to the sequence of SEQ ID NO: 3646; the sequence of SEQ ID NO: 2191 linked to the sequence of SEQ ID NO: 3648; the sequence of SEQ ID NO: 2191 linked to the sequence of SEQ ID NO: 3649; the sequence of SEQ ID NO: 2270 linked to the sequence of SEQ ID NO: 40; the sequence of SEQ ID NO: 2270 linked to the sequence of SEQ ID NO: 42; the sequence of SEQ ID NO: 2270 linked to the sequence of SEQ ID NO: 74; the sequence of SEQ ID NO: 2270 linked to the sequence of SEQ ID NO: 3645; the sequence of SEQ ID NO: 2270 linked to the sequence of SEQ ID NO: 3646; the sequence of SEQ ID NO: 2270 linked to the sequence of SEQ ID NO: 3648; or the sequence of SEQ ID NO: 2270 linked to the sequence of SEQ ID NO: 3649.

[0104] In some embodiments, the third polypeptide comprises: a fourth sequence of SEQ ID NO: 2 linked to a fifth sequence of SEQ ID NO: 3644; a fourth sequence of SEQ ID NO: 2 linked to a fifth sequence of SEQ ID NO: 39; a fourth sequence of SEQ ID NO: 10 linked to a fifth sequence of SEQ ID NO: 3644; a fourth sequence of SEQ ID NO: 10 linked to a fifth sequence of SEQ ID NO: 39; a fourth sequence of SEQ ID NO: 16 linked to a fifth sequence of SEQ ID NO: 3644; a fourth sequence of SEQ ID NO: 16 linked to a fifth sequence of SEQ ID NO: 39; a fourth sequence of SEQ ID NO: 28 linked to a fifth sequence of SEQ ID NO: 3644; a fourth sequence of SEQ ID NO: 28 linked to a fifth sequence of SEQ ID NO: 39; a fourth sequence of SEQ ID NO: 87 linked to a fifth sequence of SEQ ID NO: 3644; a fourth sequence of SEQ ID NO: 87 linked to a fifth sequence of SEQ ID NO: 39; a fourth sequence of SEQ ID NO: 90 linked to a fifth sequence of SEQ ID NO: 3644; a fourth sequence of SEQ ID NO: 90 linked to a fifth sequence of SEQ ID NO: 39; a fourth sequence of SEQ ID NO: 96 linked to a fifth sequence of SEQ ID NO: 3644; a fourth sequence of SEQ ID NO: 96 linked to a fifth sequence of SEQ ID NO: 39; a fourth sequence of SEQ ID NO: 105 linked to a fifth sequence of SEQ ID NO: 3644; a fourth sequence of SEQ ID NO: 105 linked to a fifth sequence of SEQ ID NO: 39; a fourth sequence of SEQ ID NO: 117 linked to a fifth sequence of SEQ ID NO: 3644; a fourth sequence of SEQ ID NO: 117 linked to a fifth sequence of SEQ ID NO: 39; a fourth sequence of SEQ ID NO: 120 linked to a fifth sequence of SEQ ID NO: 3644; a fourth sequence of SEQ ID NO: 120 linked to a fifth sequence of SEQ ID NO: 39; a fourth sequence of SEQ ID NO: 129 linked to a fifth sequence of SEQ ID NO: 3644; a fourth sequence of SEQ ID NO: 129 linked to a fifth sequence of SEQ ID NO: 39; a fourth sequence of SEQ ID NO: 132 linked to a fifth sequence of SEQ ID NO: 3644; a fourth sequence of SEQ ID NO: 132 linked to a fifth sequence of SEQ ID NO: 39; a fourth sequence of SEQ ID NO: 141 linked to a fifth sequence of SEQ ID NO: 3644; a fourth sequence of SEQ ID NO: 141 linked to a fifth sequence of SEQ ID NO: 39; a fourth sequence of SEQ ID NO: 150 linked to a fifth sequence of SEQ ID NO: 3644; a fourth sequence of SEQ ID NO: 150 linked to a fifth sequence of SEQ ID NO: 39; a fourth sequence of SEQ ID NO: 154 linked to a fifth sequence of SEQ ID NO: 3644; a fourth sequence of SEQ ID NO: 154 linked to a fifth sequence of SEQ ID NO: 39; a fourth sequence of SEQ ID NO: 163 linked to a fifth sequence of SEQ ID NO: 3644; a fourth sequence of SEQ ID NO: 163 linked to a fifth sequence of SEQ ID NO: 39; a fourth sequence of SEQ ID NO: 169 linked to a fifth sequence of SEQ ID NO: 3644; a fourth sequence of SEQ ID NO: 169 linked to a fifth sequence of SEQ ID NO: 39; a fourth sequence of SEQ ID NO: 175 linked to a fifth sequence of SEQ ID NO: 3644; a fourth sequence of SEQ ID NO: 175 linked to a fifth sequence of SEQ ID NO: 39; a fourth sequence of SEQ ID NO: 181 linked to a fifth sequence of SEQ ID NO: 3644; a fourth sequence of SEQ ID NO: 181 linked to a fifth sequence of SEQ ID NO: 39; a fourth sequence of SEQ ID NO: 187 linked to a fifth sequence of SEQ ID NO: 3644; a fourth sequence of SEQ ID NO: 187 linked to a fifth sequence of SEQ ID NO: 39; a fourth sequence of SEQ ID NO: 193 linked to a fifth sequence of SEQ ID NO: 3644; a fourth sequence of SEQ ID NO: 193 linked to a fifth sequence of SEQ ID NO: 39; a fourth sequence of SEQ ID NO: 202 linked to a fifth sequence of SEQ ID NO: 3644; a fourth sequence of SEQ ID NO: 202 linked to a fifth sequence of SEQ ID NO: 39; a fourth sequence of SEQ ID NO: 1101 linked to a fifth sequence of SEQ ID NO: 3644; a fourth sequence of SEQ ID NO: 1101 linked to a fifth sequence of SEQ ID NO: 39; a fourth sequence of SEQ ID NO: 1349 linked to a fifth sequence of SEQ ID NO: 3644; a fourth sequence of SEQ ID NO: 1349 linked to a fifth sequence of SEQ ID NO: 39; a fourth sequence of SEQ ID NO: 1313 linked to a fifth sequence of SEQ ID NO: 3644; a fourth sequence of SEQ ID NO: 1313 linked to a fifth sequence of SEQ ID NO: 39; a fourth sequence of SEQ ID NO: 1361 linked to a fifth sequence of SEQ ID NO: 3644; a fourth sequence of SEQ ID NO: 1361 linked to a fifth sequence of SEQ ID NO: 39; a fourth sequence of SEQ ID NO: 1367 linked to a fifth sequence of SEQ ID NO: 3644; a fourth sequence of SEQ ID NO: 1367 linked to a fifth sequence of SEQ ID NO: 39; a fourth sequence of SEQ ID NO: 1367 linked to a fifth sequence of SEQ ID NO: 3644; a fourth sequence of SEQ ID NO: 1367 linked to a fifth sequence of SEQ ID NO: 39; a fourth sequence of SEQ ID NO: 3279 linked to a fifth sequence of SEQ ID NO: 3644; or a fourth sequence of SEQ ID NO: 3279 linked to a fifth sequence of SEQ ID NO: 39.

[0105] In some embodiments, the multifunctional polypeptide molecule comprises: (i) a first polypeptide comprising an anti-TCRvβ antibody heavy chain variable region, and an immunoglobulin heavy chain constant region; (ii) a second polypeptide comprising an IL-15 receptor alpha sushi domain or a functional fragment or a functional variant thereof, an IL-15 molecule or a functional fragment or a functional variant thereof, and an immunoglobulin heavy chain constant region; and (iii) a third polypeptide comprising an anti-TCRvβ antibody light chain variable region, and an immunoglobulin light chain constant region.

[0106] In some embodiments, the multifunctional polypeptide molecule comprises: (i) a first polypeptide comprising, from the N-terminus to the C-terminus, an anti-TCRvβ antibody heavy chain variable region operatively linked to an immunoglobulin heavy chain constant region; (ii) a second polypeptide comprising, from the N-terminus to the C-terminus, an IL-15 receptor alpha sushi domain or a functional fragment or a functional variant thereof operatively linked to an IL-15 molecule or a functional fragment or a functional variant thereof operatively linked to an immunoglobulin heavy chain constant region; and (iii) a third polypeptide comprising, from the N-terminus to the C-terminus, an anti-TCRvβ antibody light chain variable region operatively linked to an immunoglobulin light chain constant region.

[0107] In some embodiments, the IL-15 receptor alpha sushi domain is operatively linked to the IL-15 molecule or a functional fragment or a functional variant thereof via a linker, the IL-15 molecule or a functional fragment or a functional variant thereof is operatively linked to the immunoglobulin heavy chain constant region via a linker, or a combination thereof.

[0108] In some embodiments, the multifunctional polypeptide molecule comprises: (i) a first polypeptide comprising the sequence of SEQ ID NO: 1346, and the sequence of SEQ ID NO: 3649; (ii) a second polypeptide comprising the sequence of SEQ ID NO: 3523, the sequence of SEQ ID NO: 2170, and the sequence of SEQ ID NO: 3648; and (iii) a third polypeptide comprising the sequence of SEQ ID NO: 1349, and the sequence of SEQ ID NO: 3644.

[0109] In some embodiments, the multifunctional polypeptide molecule comprises: (i) a first polypeptide comprising, from the N-terminus to the C-terminus, the sequence of SEQ ID NO: 1346 operatively linked to the sequence of SEQ ID NO: 3649; (ii) a second polypeptide comprising, from the N-terminus to the C-terminus, the sequence of SEQ ID NO: 3523 operatively linked to the sequence of SEQ ID NO: 2170 operatively linked to the sequence of SEQ ID NO: 3648; and (iii) a third polypeptide comprising, from the N-terminus to the C-terminus, the sequence of SEQ ID NO: 1349 operatively linked to the sequence of SEQ ID NO: 3644.

[0110] In some embodiments, the sequence of SEQ ID NO: 3523 is operatively linked to the sequence of SEQ ID NO: 2170 via the sequence of SEQ ID NO: 3524, the sequence of SEQ ID NO: 2170 is operatively linked to the sequence of SEQ ID NO: 3648 via the sequence of SEQ ID NO: 3308, or a combination thereof.

[0111] In some embodiments, the multifunctional polypeptide molecule comprises: (i) a first polypeptide comprising a sequence having at least 75% sequence identity to the sequence of SEQ ID NO: 3517; (ii) a second polypeptide comprising a sequence having at least 75% sequence identity to the sequence of SEQ ID NO: 3519; and (iii) a third polypeptide comprising a sequence having at least 75% sequence identity to the sequence of SEQ ID NO: 3518.

[0112] In some embodiments, the multifunctional polypeptide molecule comprises: (i) a first polypeptide comprising the sequence of SEQ ID NO: 3517; (ii) a second polypeptide comprising the sequence of SEQ ID NO: 3519; and (iii) a third polypeptide comprising to the sequence of SEQ ID NO: 3518.

[0113] In some embodiments, the multifunctional polypeptide molecule comprises: (i) a first polypeptide comprising an anti-TCRvβ antibody heavy chain variable region, and an immunoglobulin heavy chain constant region; (ii) a second polypeptide comprising an IL-15 molecule or a functional fragment or a functional variant thereof, and an immunoglobulin heavy chain constant region; and (iii) a third polypeptide comprising an anti-TCRvβ antibody light chain variable region, and an immunoglobulin light chain constant region.

[0114] In some embodiments, the multifunctional polypeptide molecule comprises: (i) a first polypeptide comprising, from the N-terminus to the C-terminus, an anti-TCRvβ antibody heavy chain variable region operatively linked to an immunoglobulin heavy chain constant region; (ii) a second polypeptide comprising, from the N-terminus to the C-terminus, an IL-15 molecule or a functional fragment or a functional variant thereof operatively linked to an immunoglobulin heavy chain constant region; and (iii) a third polypeptide comprising, from the N-terminus to the C-terminus, an anti-TCRvβ antibody light chain variable region operatively linked to an immunoglobulin light chain constant region.

[0115] In some embodiments, the IL-15 molecule or a functional fragment or a functional variant thereof is operatively linked to the immunoglobulin heavy chain constant region via a linker.

[0116] In some embodiments, the multifunctional polypeptide molecule comprises: (i) a first polypeptide comprising the sequence of SEQ ID NO: 1346, and the sequence of SEQ ID NO: 3649; (ii) a second polypeptide comprising the sequence of SEQ ID NO: 2170, and the sequence of SEQ ID NO: 3648; and (iii) a third polypeptide comprising the sequence of SEQ ID NO: 1349, and the sequence of SEQ ID NO: 3644.

[0117] In some embodiments, the multifunctional polypeptide molecule comprises: (i) a first polypeptide comprising, from the N-terminus to the C-terminus, the sequence of SEQ ID NO: 1346 operatively linked to the sequence of SEQ ID NO: 3649; (ii) a second polypeptide comprising, from the N-terminus to the C-terminus, the sequence of SEQ ID NO: 2170 operatively linked to the sequence of SEQ ID NO: 3648; and (iii) a third polypeptide comprising, from the N-terminus to the C-terminus, the sequence of SEQ ID NO: 1349 operatively linked to the sequence of SEQ ID NO: 3644.

[0118] In some embodiments, the sequence of SEQ ID NO: 2170 is operatively linked to the sequence of SEQ ID NO: 3648 via the sequence of SEQ ID NO: 3308, or a combination thereof.

[0119] In some embodiments, the multifunctional polypeptide molecule comprises: (i) a first polypeptide comprising a sequence having at least 75% sequence identity to the sequence of SEQ ID NO: 3517; (ii) a second polypeptide comprising a sequence having at least 75% sequence identity to the sequence of SEQ ID NO: 3520; and (iii) a third polypeptide comprising a sequence having at least 75% sequence identity to the sequence of SEQ ID NO: 3518.

[0120] In some embodiments, the multifunctional polypeptide molecule comprises: (i) a first polypeptide comprising the sequence of SEQ ID NO: 3517; (ii) a second polypeptide comprising the sequence of SEQ ID NO: 3520; and (iii) a third polypeptide comprising to the sequence of SEQ ID NO: 3518.

[0121] In some embodiments, the multifunctional polypeptide molecule comprises: (i) a first polypeptide comprising an anti-TCRvβ antibody heavy chain variable region, and an immunoglobulin heavy chain constant region; (ii) a second polypeptide comprising an IL-2 molecule or a functional fragment or a functional variant thereof or an IL-2 C125A mutant molecule or a functional fragment or a functional variant thereof, and an immunoglobulin heavy chain constant region; and (iii) a third polypeptide comprising an anti-TCRvβ antibody light chain variable region, and an immunoglobulin light chain constant region.

[0122] In some embodiments, the multifunctional polypeptide molecule comprises: (i) a first polypeptide comprising, from the N-terminus to the C-terminus, an anti-TCRvβ antibody heavy chain variable region operatively linked to an immunoglobulin heavy chain constant region; (ii) a second polypeptide comprising, from the N-terminus to the C-terminus, an IL-2 molecule or a functional fragment or a functional variant thereof or an IL-2 C125A mutant molecule or a functional fragment or a functional variant thereof operatively linked to an immunoglobulin heavy chain constant region; and (iii) a third polypeptide comprising, from the N-terminus to the C-terminus, an anti-TCRvβ antibody light chain variable region operatively linked to an immunoglobulin light chain constant region.

[0123] In some embodiments, the IL-2 molecule or a functional fragment or a functional variant thereof or the IL-2 C125A mutant molecule or a functional fragment or a functional variant thereof is operatively linked to the immunoglobulin heavy chain constant region via a linker.

[0124] In some embodiments, the multifunctional polypeptide molecule comprises: (i) a first polypeptide comprising the sequence of SEQ ID NO: 1346, and the sequence of SEQ ID NO: 3649; (ii) a second polypeptide comprising the sequence of SEQ ID NO: 2270, and the sequence of SEQ ID NO: 3648; and (iii) a third polypeptide comprising the sequence of SEQ ID NO: 1349, and the sequence of SEQ ID NO: 3644.

[0125] In some embodiments, the multifunctional polypeptide molecule comprises: (i) a first polypeptide comprising, from the N-terminus to the C-terminus, the sequence of SEQ ID NO: 1346 operatively linked to the sequence of SEQ ID NO: 3649; (ii) a second polypeptide comprising, from the N-terminus to the C-terminus, the sequence of SEQ ID NO: 2270 operatively linked to the sequence of SEQ ID NO: 3648; and (iii) a third polypeptide comprising, from the N-terminus to the C-terminus, the sequence of SEQ ID NO: 1349 operatively linked to the sequence of SEQ ID NO: 3644.

[0126] In some embodiments, the sequence of SEQ ID NO: 2270 is operatively linked to the sequence of SEQ ID NO: 3648 via the sequence of SEQ ID NO: 3308, or a combination thereof.

[0127] In some embodiments, the multifunctional polypeptide molecule comprises: (i) a first polypeptide comprising a sequence having at least 75% sequence identity to the sequence of SEQ ID NO: 3517; (ii) a second polypeptide comprising a sequence having at least 75% sequence identity to the sequence of SEQ ID NO: 3521; and (iii) a third polypeptide comprising a sequence having at least 75% sequence identity to the sequence of SEQ ID NO: 3518.

[0128] In some embodiments, the multifunctional polypeptide molecule comprises: (i) a first polypeptide comprising the sequence of SEQ ID NO: 3517; (ii) a second polypeptide comprising the sequence of SEQ ID NO: 3521; and (iii) a third polypeptide comprising to the sequence of SEQ ID NO: 3518.

[0129] In some embodiments, the multifunctional polypeptide molecule comprises the second polypeptide comprising an immunoglobulin heavy chain constant region comprising L234A, L235A, and P329G mutations, the third polypeptide comprising an immunoglobulin light chain constant region comprising L234A, L235A, and P329G mutations, or a combination thereof.

[0130] In some embodiments, the multifunctional polypeptide molecule comprises: (i) a first polypeptide comprising the sequence of SEQ ID NO: 3530, and the sequence of SEQ ID NO: 3531; (ii) a second polypeptide comprising the sequence of SEQ ID NO: 2191, and the sequence of SEQ ID NO: 3533; and (iii) a third polypeptide comprising the sequence of SEQ ID NO: 3527, and the sequence of SEQ ID NO: 3528.

[0131] In some embodiments, the multifunctional polypeptide molecule comprises: (i) a first polypeptide comprising, from the N-terminus to the C-terminus, the sequence of SEQ ID NO: 3530 operatively linked to the sequence of SEQ ID NO: 3531; (ii) a second polypeptide comprising, from the N-terminus to the C-terminus, the sequence of SEQ ID NO: 2191 operatively linked to the sequence of SEQ ID NO: 3533; and (iii) a third polypeptide comprising, from the N-terminus to the C-terminus, the sequence of SEQ ID NO: 3527 operatively linked to the sequence of SEQ ID NO: 3528.

[0132] In some embodiments, the sequence of SEQ ID NO: 2191 is operatively linked to the sequence of SEQ ID NO: 3533 via the sequence of SEQ ID NO: 3308, or a combination thereof.

[0133] In some embodiments, the first polypeptide further comprises the sequence of SEQ ID NO: 3547 operatively linked to the sequence of SEQ ID NO: 3531, the second polypeptide further comprises the sequence of SEQ ID NO: 3534 operatively linked to the sequence of SEQ ID NO: 3533, or a combination thereof.

[0134] In some embodiments, the multifunctional polypeptide molecule comprises: (i) a first polypeptide comprising a sequence having at least 75% sequence identity to the sequence of SEQ ID NO: 3529 or the sequence of SEQ ID NO: 3548; (ii) a second polypeptide comprising a sequence having at least 75% sequence identity to the sequence of SEQ ID NO: 3532 or the sequence of SEQ ID NO: 3549; and (iii) a third polypeptide comprising a sequence having at least 75% sequence identity to the sequence of SEQ ID NO: 3526.

[0135] In some embodiments, the multifunctional polypeptide molecule comprises: (i) a first polypeptide comprising the sequence of SEQ ID NO: 3529 or the sequence of SEQ ID NO: 3548; (ii) a second polypeptide comprising the sequence of SEQ ID NO: 3532 or the sequence of SEQ ID NO: 3549; and (iii) a third polypeptide comprising to the sequence of SEQ ID NO: 3526.

[0136] In some embodiments, the multifunctional polypeptide molecule comprises: (i) a first polypeptide comprising an anti-TCRvβ antibody heavy chain variable region, and an immunoglobulin heavy chain constant region; (ii) a second polypeptide comprising an IL-7 molecule or a functional fragment or a functional variant thereof, and an immunoglobulin heavy chain constant region; and (iii) a third polypeptide comprising an anti-TCRvβ antibody light chain variable region, and an immunoglobulin light chain constant region.

[0137] In some embodiments, the multifunctional polypeptide molecule comprises: (i) a first polypeptide comprising, from the N-terminus to the C-terminus, an anti-TCRvβ antibody heavy chain variable region operatively linked to an immunoglobulin heavy chain constant region; (ii) a second polypeptide comprising, from the N-terminus to the C-terminus, an IL-7 molecule or a functional fragment or a functional variant thereof operatively linked to an immunoglobulin heavy chain constant region; and (iii) a third polypeptide comprising, from the N-terminus to the C-terminus, an anti-TCRvβ antibody light chain variable region operatively linked to an immunoglobulin light chain constant region.

[0138] In some embodiments, the IL-7 molecule or a functional fragment or a functional variant thereof is operatively linked to the immunoglobulin heavy chain constant region via a linker.

[0139] In some embodiments, the multifunctional polypeptide molecule comprises: (i) a first polypeptide comprising the sequence of SEQ ID NO: 1346, and the sequence of SEQ ID NO: 3649; (ii) a second polypeptide comprising the sequence of SEQ ID NO: 3540, and the sequence of SEQ ID NO: 3648; and (iii) a third polypeptide comprising the sequence of SEQ ID NO: 1349, and the sequence of SEQ ID NO: 3644.

[0140] In some embodiments, the multifunctional polypeptide molecule comprises: (i) a first polypeptide comprising, from the N-terminus to the C-terminus, the sequence of SEQ ID NO: 1346 operatively linked to the sequence of SEQ ID NO: 3649; (ii) a second polypeptide comprising, from the N-terminus to the C-terminus, the sequence of SEQ ID NO: 3540 operatively linked to the sequence of SEQ ID NO: 3648; and (iii) a third polypeptide comprising, from the N-terminus to the C-terminus, the sequence of SEQ ID NO: 1349 operatively linked to the sequence of SEQ ID NO: 3644.

[0141] In some embodiments, the sequence of SEQ ID NO: 3540 is operatively linked to the sequence of SEQ ID NO: 3648 via the sequence of SEQ ID NO: 3308, or a combination thereof.

[0142] In some embodiments, the multifunctional polypeptide molecule comprises: (i) a first polypeptide comprising a sequence having at least 75% sequence identity to the sequence of SEQ ID NO: 3517; (ii) a second polypeptide comprising a sequence having at least 75% sequence identity to the sequence of SEQ ID NO: 3539; and (iii) a third polypeptide comprising a sequence having at least 75% sequence identity to the sequence of SEQ ID NO: 3518.

[0143] In some embodiments, the multifunctional polypeptide molecule comprises: (i) a first polypeptide comprising the sequence of SEQ ID NO: 3517; (ii) a second polypeptide comprising the sequence of SEQ ID NO: 3539; and (iii) a third polypeptide comprising to the sequence of SEQ ID NO: 3518.

[0144] In some embodiments, the multifunctional polypeptide molecule comprises: (i) a first polypeptide comprising an anti-TCRvβ antibody heavy chain variable region, and an immunoglobulin heavy chain constant region; (ii) a second polypeptide comprising an IL-12 molecule or a functional fragment or a functional variant thereof, and an immunoglobulin heavy chain constant region; and (iii) a third polypeptide comprising an anti-TCRvβ antibody light chain variable region, and an immunoglobulin light chain constant region.

[0145] In some embodiments, the multifunctional polypeptide molecule comprises: (i) a first polypeptide comprising, from the N-terminus to the C-terminus, an anti-TCRvβ antibody heavy chain variable region operatively linked to an immunoglobulin heavy chain constant region; (ii) a second polypeptide comprising, from the N-terminus to the C-terminus, an IL-12 molecule or a functional fragment or a functional variant thereof operatively linked to an immunoglobulin heavy chain constant region; and (iii) a third polypeptide comprising, from the N-terminus to the C-terminus, an anti-TCRvβ antibody light chain variable region operatively linked to an immunoglobulin light chain constant region.

[0146] In some embodiments, the IL-12 molecule or a functional fragment or a functional variant thereof comprises an IL-12 beta subunit or a functional fragment or a functional variant thereof and a IL-12 alpha subunit or a functional fragment or a functional variant thereof.

[0147] In some embodiments, the IL-12 molecule or a functional fragment or a functional variant thereof comprises, from the N-terminus to the C-terminus, an IL-12 beta subunit or a functional fragment or a functional variant thereof operatively linked to a IL-12 alpha subunit or a functional fragment or a functional variant thereof.

[0148] In some embodiments, the IL-12 beta subunit or a functional fragment or a functional variant thereof is operatively linked to the IL-12 alpha subunit or a functional fragment or a functional variant thereof via a linker, the IL-12 alpha subunit or a functional fragment or a functional variant thereof is operatively linked to the immunoglobulin heavy chain constant region via a linker, or a combination thereof.

[0149] In some embodiments, the multifunctional polypeptide molecule comprises: (i) a first polypeptide comprising the sequence of SEQ ID NO: 1346, and the sequence of SEQ ID NO: 3649; (ii) a second polypeptide comprising the sequence of SEQ ID NO: 3542, and the sequence of SEQ ID NO: 3648; and (iii) a third polypeptide comprising the sequence of SEQ ID NO: 1349, and the sequence of SEQ ID NO: 3644.

[0150] In some embodiments, the multifunctional polypeptide molecule comprises: (i) a first polypeptide comprising, from the N-terminus to the C-terminus, the sequence of SEQ ID NO: 1346 operatively linked to the sequence of SEQ ID NO: 3649; (ii) a second polypeptide comprising, from the N-terminus to the C-terminus, the sequence of SEQ ID NO: 3542 operatively linked to the sequence of SEQ ID NO: 3648; and (iii) a third polypeptide comprising, from the N-terminus to the C-terminus, the sequence of SEQ ID NO: 1349 operatively linked to the sequence of SEQ ID NO: 3644.

[0151] In some embodiments, the IL-12 molecule or a functional fragment or a functional variant thereof comprises the sequence of SEQ ID NO: 3543 and the sequence of SEQ ID NO: 3545.

[0152] In some embodiments, the IL-12 molecule or a functional fragment or a functional variant thereof comprises, from the N-terminus to the C-terminus, the sequence of SEQ ID NO: 3543 operatively linked to the sequence of SEQ ID NO:3545.

[0153] In some embodiments, the sequence of SEQ ID NO: 3543 is operatively linked to the sequence of SEQ ID NO: 3545 via the sequence of SEQ ID NO: 3544, the sequence of SEQ ID NO: 3545 is operatively linked to the sequence of SEQ ID NO: 3648 via the sequence of SEQ ID NO: 3308, or a combination thereof.

[0154] In some embodiments, the multifunctional polypeptide molecule comprises: (i) a first polypeptide comprising a sequence having at least 75% sequence identity to the sequence of SEQ ID NO: 3517; (ii) a second polypeptide comprising a sequence having at least 75% sequence identity to the sequence of SEQ ID NO: 3541; and (iii) a third polypeptide comprising a sequence having at least 75% sequence identity to the sequence of SEQ ID NO: 3518.

[0155] In some embodiments, the multifunctional polypeptide molecule comprises: (i) a first polypeptide comprising the sequence of SEQ ID NO: 3517; (ii) a second polypeptide comprising the sequence of SEQ ID NO: 3541; and (iii) a third polypeptide comprising to the sequence of SEQ ID NO: 3518.

[0156] In some embodiments, the multifunctional polypeptide molecule comprises: (i) a first polypeptide comprising an anti-TCRvβ antibody heavy chain variable region, and an immunoglobulin heavy chain constant region; (ii) a second polypeptide comprising an IL-21 molecule or a functional fragment or a functional variant thereof, and an immunoglobulin heavy chain constant region; and (iii) a third polypeptide comprising an anti-TCRvβ antibody light chain variable region, and an immunoglobulin light chain constant region.

[0157] In some embodiments, the multifunctional polypeptide molecule comprises: (i) a first polypeptide comprising, from the N-terminus to the C-terminus, an anti-TCRvβ antibody heavy chain variable region operatively linked to an immunoglobulin heavy chain constant region; (ii) a second polypeptide comprising, from the N-terminus to the C-terminus, an IL-21 molecule or a functional fragment or a functional variant thereof operatively linked to an immunoglobulin heavy chain constant region; and (iii) a third polypeptide comprising, from the N-terminus to the C-terminus, an anti-TCRvβ antibody light chain variable region operatively linked to an immunoglobulin light chain constant region.

[0158] In some embodiments, the IL-21 molecule or a functional fragment or a functional variant thereof is operatively linked to the immunoglobulin heavy chain constant region via a linker, or a combination thereof.

[0159] In some embodiments, the multifunctional polypeptide molecule comprises: (i) a first polypeptide comprising the sequence of SEQ ID NO: 1346, and the sequence of SEQ ID NO: 3649; (ii) a second polypeptide comprising the sequence of SEQ ID NO: 2193, and the sequence of SEQ ID NO: 3648; and (iii) a third polypeptide comprising the sequence of SEQ ID NO: 1349, and the sequence of SEQ ID NO: 3644.

[0160] In some embodiments, the multifunctional polypeptide molecule comprises: (i) a first polypeptide comprising, from the N-terminus to the C-terminus, the sequence of SEQ ID NO: 1346 operatively linked to the sequence of SEQ ID NO: 3649; (ii) a second polypeptide comprising, from the N-terminus to the C-terminus, the sequence of SEQ ID NO: 2193 operatively linked to the sequence of SEQ ID NO: 3648; and (iii) a third polypeptide comprising, from the N-terminus to the C-terminus, the sequence of SEQ ID NO: 1349 operatively linked to the sequence of SEQ ID NO: 3644.

[0161] In some embodiments, the sequence of SEQ ID NO: 2193 is operatively linked to the sequence of SEQ ID NO: 3648 via the sequence of SEQ ID NO: 3308.

[0162] In some embodiments, the multifunctional polypeptide molecule comprises: (i) a first polypeptide comprising a sequence having at least 75% sequence identity to the sequence of SEQ ID NO: 3517; (ii) a second polypeptide comprising a sequence having at least 75% sequence identity to the sequence of SEQ ID NO: 3546; and (iii) a third polypeptide comprising a sequence having at least 75% sequence identity to the sequence of SEQ ID NO: 3518.

[0163] In some embodiments, the multifunctional polypeptide molecule comprises: (i) a first polypeptide comprising the sequence of SEQ ID NO: 3517; (ii) a second polypeptide comprising the sequence of SEQ ID NO: 3546; and (iii) a third polypeptide comprising to the sequence of SEQ ID NO: 3518.

[0164] In some embodiments, the multifunctional polypeptide molecule comprises: (i) a first polypeptide comprising an anti-TCRvβ antibody heavy chain variable region, and an immunoglobulin heavy chain constant region; and (ii) a second polypeptide comprising an anti-TCRvβ antibody light chain variable region, an immunoglobulin light chain constant region, and an IL-2 molecule or a functional fragment or a functional variant thereof.

[0165] In some embodiments, the multifunctional polypeptide molecule comprises: (i) a first polypeptide comprising, from the N-terminus to the C-terminus, an anti-TCRvβ antibody heavy chain variable region operatively linked to an immunoglobulin heavy chain constant region; and (ii) a second polypeptide comprising, from the N-terminus to the C-terminus, an anti-TCRvβ antibody light chain variable region operatively linked to an immunoglobulin light chain constant region operatively linked to an IL-2 molecule or a functional fragment or a functional variant thereof.

[0166] In some embodiments, the immunoglobulin light chain constant region is operatively linked to the IL-21 molecule or a functional fragment or a functional variant thereof via a linker.

[0167] In some embodiments, the multifunctional polypeptide molecule comprises two first polypeptides and two second polypeptides.

[0168] In some embodiments, the multifunctional polypeptide molecule comprises the first polypeptide comprising an immunoglobulin heavy chain constant region comprising L234A, L235A, and P329G mutations.

[0169] In some embodiments, the multifunctional polypeptide molecule comprises: (i) a first polypeptide comprising the sequence of SEQ ID NO: 3530 and the sequence of SEQ ID NO: 3537; and (ii) a second polypeptide comprising the sequence of SEQ ID NO: 3527, the sequence of SEQ ID NO: 3528, and the sequence of SEQ ID NO: 2191.

[0170] In some embodiments, the multifunctional polypeptide molecule comprises: (i) a first polypeptide comprising, from the N-terminus to the C-terminus, the sequence of SEQ ID NO: 3530 operatively linked to the sequence of SEQ ID NO: 3537; and (ii) a second polypeptide comprising, from the N-terminus to the C-terminus, the sequence of SEQ ID NO: 3527 operatively linked to the sequence of SEQ ID NO: 3528 operatively linked to the sequence of SEQ ID NO: 2191.

[0171] In some embodiments, the sequence of SEQ ID NO: 3528 is operatively linked to the sequence of SEQ ID NO: 2191 via the sequence of SEQ ID NO: 3309.

[0172] In some embodiments, the multifunctional polypeptide molecule comprises two first polypeptides and two second polypeptides.

[0173] In some embodiments, the multifunctional polypeptide molecule comprises: (i) a first polypeptide comprising a sequence having at least 75% sequence identity to the sequence of SEQ ID NO: 3536; and (ii) a second polypeptide comprising a sequence having at least 75% sequence identity to the sequence of SEQ ID NO: 3535.

[0174] In some embodiments, the multifunctional polypeptide molecule comprises: (i) a first polypeptide comprising the sequence of SEQ ID NO: 3536; and (ii) a second polypeptide comprising the sequence of SEQ ID NO: 3535.

[0175] In another aspect, described herein is an antibody comprising an anti-T cell receptor beta variable chain (TCRβV) binding domain comprising: (i) a heavy chain variable region (VH) comprising a heavy chain complementarity determining region 1 (HC CDR1), a heavy chain complementarity determining region 2 (HC CDR2), and a heavy chain complementarity determining region 3 (HC CDR3) comprising an amino acid sequence having at least 75% sequence identity to SEQ ID NO: 3650, SEQ ID NO: 3651, and SEQ ID NO: 5, respectively; (ii) a light chain variable region (VL) comprising a light chain complementarity determining region 1 (LC CDR1), a light chain complementarity determining region 2 (LC CDR2), and a light chain complementarity determining region 3 (LC CDR3) comprising an amino acid sequence having at least 75% sequence identity to SEQ ID NO: 3655, SEQ ID NO: 3653, and SEQ ID NO: 8, respectively; or (iii) a combination thereof.

[0176] In some embodiments, the TCRβV binding domain comprising: (i) a VH comprising a HC CDR1, a HC CDR2, and a HC CDR3 comprising the amino acid sequence of SEQ ID NO: 3650, SEQ ID NO: 3651, and SEQ ID NO: 5, respectively; (ii) a VL comprising a LC CDR1, a LC CDR2, and a LC CDR3 comprising the amino acid sequence of SEQ ID NO: 3655, SEQ ID NO: 3653, and SEQ ID NO: 8, respectively; or (iii) a combination thereof.

[0177] In some embodiments, the TCRβV binding domain comprising: (i) a VH comprising an amino acid sequence having at least 75% sequence identity to SEQ ID NO: 1346; (ii) a VL comprising an amino acid sequence having at least 75% sequence identity to SEQ ID NO: 1349; or (iii) a combination thereof.

[0178] In some embodiments, the TCRβV binding domain comprising: (i) a VH comprising the amino acid sequence of SEQ ID NO: 1346; (ii) a VL comprising the amino acid sequence of SEQ ID NO: 1349; or (iii) a combination thereof.

[0179] In an aspect, described herein is a nucleic acid molecule comprising a nucleotide sequence encoding the multifunctional polypeptide molecule as described herein or the antibody as described herein.

[0180] In some embodiments, the nucleic acid molecule is an isolated nucleic acid molecule.

[0181] In an aspect, described herein is a vector comprising one or more of the nucleic acid molecules as described herein.

[0182] In an aspect, described herein is a cell comprising the nucleic acid molecules as described herein, or the vector as described herein.

[0183] In an aspect, described herein is a pharmaceutical composition comprising the multifunctional polypeptide molecule as described herein, the antibody as described herein, the nucleic acid molecules as described herein, the vector as described herein, or the cell as described herein, and a pharmaceutically acceptable carrier, excipient, or diluent.

[0184] In an aspect, described herein is a method of treating a condition or disease in a subject in need therefor comprising administering to the subject a therapeutically effective amount of the multifunctional polypeptide molecule as described herein, the antibody as described herein, the nucleic acid molecules as described herein, the vector as described herein, the cell as described herein, the pharmaceutical composition as described herein, or a combination thereof, wherein the administering is effective to treat the condition or disease in the subject.

[0185] In some embodiments, the condition or disease is cancer.

[0186] In some embodiments, the cancer is a solid tumor, a hematological cancer, a metastatic cancer, a soft tissue tumor, or a combination thereof.

[0187] In some embodiments, the cancer is the solid tumor, and the solid tumor is selected from the group consisting of melanoma, pancreatic cancer, breast cancer, colorectal cancer, lung cancer, skin cancer, ovarian cancer, liver cancer, and a combination thereof.

[0188] In some embodiments, the cancer is the hematological cancer, and the hematological cancer is selected from the group consisting of Hodgkin's lymphoma, Non-Hodgkin's lymphoma, acute myeloid leukemia (AML), chronic myeloid leukemia, myelodysplastic syndrome, multiple myeloma, T-cell lymphoma, acute lymphocytic leukemia, and a combination thereof.

[0189] In some embodiments, the Non-Hodgkin's lymphoma is selected from the group consisting of B cell lymphoma, diffuse large B cell lymphoma (DLBCL), follicular lymphoma, chronic lymphocytic leukemia (B-CLL), mantle cell lymphoma, marginal zone B-cell lymphoma, Burkitt lymphoma, lymphoplasmacytic lymphoma, hairy cell leukemia, and a combination thereof.

[0190] In some embodiments, the T-cell lymphoma is peripheral T-cell lymphoma.

[0191] In some embodiments, the cancer is characterized by a cancer antigen present on the cancer.

[0192] In some embodiments, the cancer antigen is a tumor antigen, a stromal antigen, or a hematological antigen.

[0193] In some embodiments, the cancer antigen is selected from the group consisting of BCMA, CD19, CD20, CD22, FcRH5, PDL1, CD47, gangloside 2 (GD2), prostate stem cell antigen (PSCA), prostate specific membrane antigen (PMSA), prostate-specific antigen (PSA), carcinoembryonic antigen (CEA), Ron Kinase, c-Met, Immature laminin receptor, TAG-72, BING-4, Calcium-activated chloride channel 2, Cyclin-B1, 9D7, Ep-CAM, EphA3, Her2/neu, Telomerase, SAP-1, Survivin, NY-ESO-1/LAGE-1, PRAME, SSX-2, Melan-A/MART-1, Gp100/pmel17, Tyrosinase, TRP-1/-2, MC1R, β-catenin, BRCA1/2, CDK4, CML66, Fibronectin, p53, Ras, TGF-B receptor, AFP, ETA, MAGE, MUC-1, CA-125, BAGE, GAGE, NY-ESO-1, β-catenin, CDK4, CDC27, α actinin-4, TRP1/gp75, TRP2, gp100, Melan-A/MART1, gangliosides, WT1, EphA3, Epidermal growth factor receptor (EGFR), MART-2, MART-1, MUC1, MUC2, MUM1, MUM2, MUM3, NA88-1, NPM, OA1, OGT, RCC, RUI1, RUI2, SAGE, TRG, TRP1, TSTA, Folate receptor alpha, L1-CAM, CAIX, gpA33, GD3, GM2, VEGFR, Intergrins, carbohydrates, IGF1R, EPHA3, TRAILR1, TRAILR2, RANKL, FAP, TGF-beta, hyaluronic acid, collagen, tenascin C, and tenascin W.

[0194] In some embodiments, the method further comprises administering a second therapeutic agent or therapy to the subject.

[0195] In some embodiments, the second therapeutic agent or therapy comprises a chemotherapeutic agent, a biologic agent, a hormonal therapy, radiation, or surgery.

[0196] In some embodiments, the second therapeutic agent or therapy is administered in combination with the multifunctional polypeptide molecule as described herein, the antibody as described herein, the nucleic acid molecules as described herein, the vector as described herein, the cell as described herein, the pharmaceutical composition as described herein, sequentially, simultaneously, or concurrently.

### INCORPORATION BY REFERENCE

[0197] All publications, patents, and patent applications mentioned in this specification are herein incorporated by reference to the same extent as if each individual publication, patent, or patent application was specifically and individually indicated to be incorporated by reference.

### BRIEF DESCRIPTION OF THE DRAWINGS

[0198] The novel features of the disclosure are set forth with particularity in the appended claims. A better understanding of the features and advantages of the present disclosure will be obtained by reference to the following detailed description that sets forth illustrative embodiments, in which the principles of the disclosure are utilized, and the accompanying drawings of which:

[0199] FIGS. 1A-1T depict exemplary embodiments of multifunctional molecules as described herein. FIGS. 1A, 1B and 1C depict exemplary embodiments of multifunctional molecules containing multiple, e.g., two, molecules of an exemplary cytokine, interleukin-2 (IL-2), linked to an antibody molecule that binds to a T cell receptor beta variable region (TCRβV) (“anti-TCRβV antibody molecule”). FIGS. 1D, 1E and 1F depict exemplary embodiments of multifunctional molecules containing a single molecule of an exemplary cytokine, IL-2, linked to an anti-TCRβV antibody molecule. FIGS. 1G, 1H, 1I, and 1J depict exemplary embodiments of multifunctional molecules containing an exemplary cytokine, IL-2, linked to a first dimerization module. FIGS. 1K, 1L and 1M depict exemplary embodiments of multifunctional molecules containing an exemplary dimerization module, e.g., an Fc region comprising a N297A mutation, and multiple, e.g., two, molecules of an exemplary cytokine, IL-2, linked to an anti-TCRβV antibody molecule. FIGS. 1N, 1O and 1P depict exemplary embodiments of multifunctional molecules containing an exemplary dimerization module, e.g., an Fc region comprising a N297A mutation (Knob-in-hole), and a single molecule of an exemplary cytokine, IL-2, linked to an anti-TCRβV antibody molecule. FIGS. 1Q, 1R, 1S and 1T depict exemplary embodiments of multifunctional molecules containing an exemplary dimerization module, e.g., an Fc region comprising a N297A mutation (Knob-in-hole), and an exemplary cytokine, IL-2, linked to the exemplary dimerization module.

[0200] FIGS. 2A-2B shows the alignment of the Antibody A source mouse VH and VL framework 1, CDR 1, framework 2, CDR 2, framework 3, CDR3, and framework 4 regions with their respective humanized sequences. Kabat CDRs are shown in bold, Chothia CDRs are shown in italics, and combined CDRs are shown in boxes. The framework positions that were back mutated are double underlined. FIG. 2A shows VH sequences for murine Antibody A (SEQ ID NO: 1) and humanized Antibody A-H (SEQ ID NO: 9). FIG. 2B shows VL sequences for murine Antibody A (SEQ ID NO: 2) and humanized Antibody A-H (SEQ ID NO: 10 and SEQ ID NO: 11).

[0201] FIGS. 3A-3B shows the alignment of the Antibody B source mouse VH and VL framework 1, CDR 1, framework 2, CDR 2, framework 3, CDR3, and framework 4 regions with their respective humanized sequences. Kabat CDRs are shown in bold, Chothia CDRs are shown in italics, and combined CDRs are shown in boxes. The framework positions that were back mutated are double underlined. FIG. 3A shows the VH sequence for murine Antibody B (SEQ ID NO: 15) and humanized VH sequences B-H.1A to B-H.1C (SEQ ID NOs: 23-25). FIG. 3B shows the VL sequence for murine Antibody B (SEQ ID NO: 16) and humanized VL sequences B-H.1D to B-H.1H (SEQ ID NOs: 26-30).

[0202] FIG. 4 depicts the phylogenetic tree of TCRBV gene family and subfamilies with corresponding antibodies mapped. Subfamily identities are as follows: Subfamily A: TCRβ V6; Subfamily B: TCRβ V10; Subfamily C: TCRβ V12; Subfamily D: TCRβ V5; Subfamily E: TCRβ V7; Subfamily F: TCRβ V11; Subfamily G: TCRβ V14; Subfamily H: TCRβ V16; Subfamily I: TCRβ V18; Subfamily J: TCRβ V9; Subfamily K: TCRβ V13; Subfamily L: TCRβ V4; Subfamily M: TCRβ V3; Subfamily N: TCRβ V2; Subfamily O: TCRβ V15; Subfamily P: TCRβ V30; Subfamily Q: TCRβ V19; Subfamily R: TCRβ V27; Subfamily S: TCRβ V28; Subfamily T: TCRβ V24; Subfamily U: TCRβ V20; Subfamily V: TCRβ V25; and Subfamily W: TCRβ V29 subfamily. Subfamily members are described in detail herein in the Section titled “TCR beta V (TCRβV)”.

[0203] FIGS. 5A-5C show human CD3+ T cells activated by anti-TCR Vβ 13.1 antibody (A-H.1) for 6-days. Human CD3+ T cells were isolated using magnetic-bead separation (negative selection) and activated with immobilized (plate-coated) anti-TCR Vβ 13.1 (A-H.1) or anti-CD3c (OKT3) antibodies at 100 nM for 6 days. FIG. 5A shows two scatter plots (left: activated with OKT3; and right: activated with A-H.1) of expanded T cells assessed for TCR Vβ 13.1 surface expression using anti-TCR Vβ 13.1 (A-H.1) followed by a secondary fluorochrome-conjugated antibody for flow cytometry analysis. FIG. 5B shows percentage (%) of TCR Vβ 13.1 positive T cells activated by anti-TCR Vβ 13.1 (A-H.1) or anti-CD3e (OKT3) plotted against total T cells (CD3+). FIG. 5C shows relative cell count acquired by counting the number of events in each T cell subset gate (CD3 or TCR Vβ13.1) for 20 seconds at a constant rate of 60 μl/min. Data shown as mean value from 3 donors.

[0204] FIGS. 6A-6B show cytolytic activity of human CD3+ T cells activated by anti-TCR Vβ13.1 antibody (A-H.1) against transformed cell line RPMI 8226. FIG. 6A depicts target cell lysis of human CD3+ T cells activated with A-H.1 or OKT3. Human CD3+ T cells were isolated using magnetic-bead separation (negative selection) and activated with immobilized (plate-coated) A-H.1 or OKT3 at the indicated concentrations for 4 days prior to co-culture with RPMI 8226 cells at a (E:T) ratio of 5:1 for 2 days. Samples were next analyzed for cell lysis of RPMI 8226 cells by FACS staining for CFSE/CD138-labeled, and membrane-impermeable DNA dyes (DRAQ7) using flow cytometry analysis. FIG. 6B shows target cell lysis of human CD3+ T cells activated with A-H.1 or OKT3 incubated with RPMI-8226 at a (E:T) ratio of 5:1 for 6 days followed by cell lysis analysis of RPMI 8226 cells as described above. Percentage (%) target cell lysis was determined by normalizing to basal target cell lysis (i.e. without antibody treatment) using the following formula, [(x−basal)/(100%−basal), where x is cell lysis of sample]. Data shown is a representative of n=1 donor.

[0205] FIGS. 7A-7B show IFNγ production by human PBMCs activated with the indicated antibodies. Human PBMCs were isolated from whole blood from the indicated number of donors, followed by solid-phase (plate-coated) stimulation with the indicated antibodies at 100 Nm. Supernatant was collected on Days 1, 2, 3, 5, or 6. FIG. 7A is a graph comparing the production of IFNγ in human PBMCs activated with the antibodies indicated activated with anti-TCR Vβ13.1 antibodies (A-H.1 or A-H.2) or anti-CD3e antibodies (OKT3 or SP34-2) on Day 1, 2, 3, 5, or 6 post-activation. FIG. 7B shows IFNγ production in human PBMCs activated with the antibodies indicated activated with the indicated anti-TCR Vβ13.1 antibodies or anti-CD3e antibody (OKT3) on Day 1, 2, 3, 5, or 6 post-activation.

[0206] FIGS. 8A-8B show IL-2 production by human PBMCs activated with the indicated antibodies. A similar experimental setup as described for FIGS. 7A-7B was used.

[0207] FIGS. 9A-9B show IL-6 production by human PBMCs activated with the indicated antibodies. A similar experimental setup as described for FIGS. 7A-7B was used.

[0208] FIGS. 10A-10B show TNF-alpha production by human PBMCs activated with the indicated antibodies. A similar experimental setup as described for FIGS. 7A-7B was used.

[0209] FIGS. 11A-11B show IL-1beta production by human PBMCs activated with the indicated antibodies. A similar experimental setup as described for FIGS. 7A-7B was used.

[0210] FIGS. 12A-12B are graphs showing delayed kinetics of IFNγ secretion in human PMBCs activated by anti-TCR Vβ13.1 antibody A-H.1 when compared to PBMCs activated by anti-CD3e antibody OKT3. FIG. 12A shows IFNγ secretion data from 4 donors. FIG. 12B shows IFNγ secretion data from 4 additional donors. Data shown is representative of n=8 donors.

[0211] FIG. 13 depicts increased CD8+ TSCM and Temra T cell subsets in human PBMCs activated by anti-TCR Vβ13.1 antibodies (A-H.1 or A-H.2) compared to PBMCs activated by anti-CD3e antibodies (OKT3 or SP34-2).

[0212] FIGS. 14A-14F show characterization of an anti-TCRVb antibody. FIG. 14A is a graph depicting proliferation of T cells activated with anti-CD3 (OKT3) antibody or anti-TCRVb antibody. FIG. 14B shows selective expansion of CD45RA+ effector memory CD8+ and CD4+ T cells (TEMRA) cells with anti-TCRVb antibodies. Tn=naïve T cell; Tscm=stem cell memory T cell; Tcm=central memory T cell; Tem=effector memory T cell; Temra=effector memory CD45RA+ T cell. FIG. 14C is a graph showing IFN-g secretion by PBMCs stimulated with an anti-TCRVb antibody, or anti-CD3 antibodies. FIG. 14D shows target cell lysis by T cells stimulated with an anti-TCRVb antibody, or anti-CD3 antibodies. Cells were stimulated for 4 days followed by 2 days incubation with multiple myeloma target cells for assessment of cell killing. FIG. 14E is a graph showing perform secretion by T cells stimulated with an anti-TCRVb antibody, or an anti-CD3 antibody. Perforin was analyzed by FACS staining in TCRVB-positive and TCRVB-negative T cells in PBMCs after 5 days of stimulation with 100 ng/ml plate-bound antibody. FIG. 14F is a graph showing Granzyme B by T cells stimulated with an anti-TCRVb antibody, or an anti-CD3 antibody. Granzyme B was analyzed by FACS staining in TCRVB-positive and TCRVB-negative T cells in PBMCs after 5 days of stimulation with 100 ng/ml plate-bound antibody.

[0213] FIGS. 15A-15B show production of IL-2 and IL-15 and expansion of human NK cells by stimulation of PBMCs with anti-TCRVb antibody for 6 days at a dose of 100 nM. FIG. 15A shows secretion of IL-2 or IL-15 in T cells stimulated with an anti-TCRVb antibody, or anti-CD3 antibodies. FIG. 15B depicts flow cytometry dot plots showing NKp46 staining vs CD56 antibody staining in cells stimulated with an anti-TCRVb antibody or an anti-CD3 antibody or a control sample.

[0214] FIGS. 16A-16C show secretion of cytokines in PBMCs stimulated with an anti-TCRVb antibody, or anti-CD3 antibodies.

[0215] FIGS. 17A-17B show killing of MM cells by dual targeting BCMA-TCRvb antibody molecules. FIG. 17A shows in vitro killing by one of the following dual-targeting antibody molecules: BCMA-TCRVb (Molecule I), BCMA-CD3, or Control-TCRVb; or an isotype control. FIG. 17B shows in vivo killing of MM cells by a dual-targeting BCM-TCRVb antibody (Molecule I).

[0216] FIG. 18 shows lysis of MM target cells with a dual targeting antibody (Molecule E) which recognized FcRH5 on one arm and TCRVb on the other arm.

[0217] FIGS. 19A-19B demonstrate cytokine production from human PBMCs activated by anti-TCR Vβ8a antibodies (B-H.1) when compared to those activated by anti-CD3ε antibodies (OKT3 or SP34-2). FIG. 19A shows that human PBMCs activated by anti-TCR Vβ8a antibodies (B-H.1) produce similar or reduced levels of IFNγ. FIG. 19B shows human PBMCs activated by anti-TCR Vβ8a antibodies (B-H.1) produce higher levels of IL-2 when compared to those activated by anti-CD3ε antibodies (OKT3 or SP34-2). Data shown is representative of n=6 donors.

[0218] FIGS. 20A-20C demonstrate cytokine production from human PBMCs activated by anti-TCR Vβ8a antibodies (B-H.1). Human PBMCs activated by anti-TCR Vβ8a antibodies (B-H.1) do not significantly produce IL-6 (FIG. 20A), IL1β (FIG. 20B), and less TNFα (FIG. 20C), when compared to PBMCs activated by anti-CD3ε antibodies (OKT3 or SP34-2). Data shown is representative of n=6 donors.

[0219] FIGS. 21A-21E demonstrate cytokine production from human PBMCs activated by anti-TCRβV Antibody D antibody compared to control anti-CD3e antibody (OKT3). FIG. 21A shows that human PBMCs activated by anti-TCRβV Antibody D antibody produce similar or reduced levels of IFNγ. FIG. 21B shows human PBMCs activated by anti-TCRβV Antibody D antibody produce higher levels of IL-2 when compared to those activated by anti-CD3ε antibodies (OKT3). Human PBMCs activated by anti-TCRβV Antibody D antibody do not significantly produce IL-1beta (FIG. 21C), IL-6, (FIG. 21D), or TNFalpha (FIG. 21E). Data shown is representative of n=4 donors.

[0220] FIGS. 22A-22B demonstrate cytokine production from human PBMCs activated by anti-TCR Vβ5 antibody (Antibody E). FIG. 22A shows that human PBMCs activated by anti-TCR Vβ5 antibody produce similar or reduced levels of IFNγ compared to PBMCS activated by anti-CD3ε antibodies (OKT3 or SP34-2). FIG. 22B shows human PBMCs activated by the anti-TCR Vβ5 1 antibody produce higher levels of IL-2 when compared to those activated by anti-CD3ε antibodies (OKT3 or SP34-2). Data shown is representative of n=4 donors.

[0221] FIGS. 23A-23D demonstrate cytokine production from human PBMCs activated by an anti-TCR Vβ5 antibody (Antibody E). Human PBMCs activated by anti-TCR Vβ5 antibody do not significantly produce IL-1beta (FIG. 23A), IL-6, (FIG. 23B), TNFalpha (FIG. 23C), or IL-10 (FIG. 23D) as compared to PBMCs activated by anti-CD3ε antibodies (OKT3 or SP34-2). Data shown is representative of n=4 donors.

[0222] FIGS. 24A-24F demonstrate cytokine production from human PBMCs activated by a dual targeting (bispecific molecule) comprising an anti-TCRβV binding moiety and a BCMA binding moiety. FIG. 24A shows that human PBMCs activated by the bispecific molecule produce similar or reduced levels of IFNγ as PBMCS activated by anti-CD3ε antibodies (OKT3). FIG. 24B shows human PBMCs activated by the bispecific molecule produce higher levels of IL-2 when compared to PBMCs activated by anti-CD3ε antibodies (OKT3). Human PBMCs activated by the bispecific molecule do not significantly produce IL-1beta (FIG. 24C), IL-6, (FIG. 24D), TNFalpha (FIG. 24E), or IL-10 (FIG. 24F). Data shown is representative of n=3 donors.

[0223] FIGS. 25A-25B show the structure and sequence of eight TCRβV proteins from seven different subfamilies: TCRβV6 subfamily (TCRβV6-5 and TCRβV6-4 are shown), TCRβV28 subfamily, TCRβV19 subfamily, TCRβV9 subfamily, TCRβV5 subfamily, TCRβV20 subfamily and TCRβV12 subfamily. FIG. 25A shows the structural alignment of the different TCRβV proteins. The circled area represents the outward facing region comprising the proposed binding site for the anti-TCRβV antibodies as described herein. FIG. 25B shows the amino acid sequence alignment of the proteins shown in FIG. 25A (SEQ ID NOS 3449-3456, respectively, in order of appearance). The various TCRβV proteins (from 7 different TCRβV subfamilies) have diverse sequences but share a conserved (similar) structure and function.

[0224] FIGS. 26A-26J show cytokine or chemokine secretion of PBMCs activated with anti-TCRVb antibodies (A-H.1, B-H.1), a bispecific molecule comprising an anti-TCRVb antibody (Molecule H), control isotype (122) or anti-CD3e antibody (OKT3). Data shown is representative of n=2 donors and representative of 2 independent experiments.

[0225] FIGS. 27A-27H show cytokine or chemokine secretion of PBMCs activated with anti-TCRVb antibodies (A-H.1, B-H.1), a bispecific molecule comprising an anti-TCRVb antibody (Molecule H), control isotype (122) or anti-CD3e antibody (OKT3). Data shown is representative of n=2 donors and representative of 2 independent experiments.

[0226] FIGS. 28A-28L show cytokine or chemokine secretion of PBMCs activated with anti-TCRVb antibodies (A-H.1, B-H.1), a bispecific molecule comprising an anti-TCRVb antibody (Molecule H), control isotype (122) or anti-CD3e antibody (OKT3). Data shown is representative of n=2 donors and representative of 2 independent experiments.

[0227] FIG. 29 is a graph depicting mean tumor volume in NOD/SCID/IL-2Rγnull (NSG) mice engrafted with Raji-luc cells at days 10 to 28. The Star denotes PBMC implantation. Open triangles denote antibody treatment with the indicated antibodies.

[0228] FIGS. 30A-30F are graphs showing cytokine secretion stimulated by anti-TRBC1 (Antibody F) or anti-CD3 (OKT3) at Days 2 and 5. Cytokines examined include: IFNγ (FIG. 30A), IL-2 (FIG. 30B), IL-1β (FIG. 30C), IL-6 (FIG. 30D), IL-10 (FIG. 30E), and TNFα (FIG. 31F).

[0229] FIG. 31 is a FACS plot showing the expansion of TCRvb 6-5+ T cells over 8 days using anti-TCRvb 6-5 v1.

[0230] FIG. 32 is a bar graph showing the expansion of TCRvb 6-5+CD4+ T cells and TCRvb 6-5+CD8+ T cells over 8 days using the anti-CD3ε antibody OKT3 (100 nM).

[0231] FIG. 33 is a bar graph showing the expansion of TCRvb 6-5+CD4+ T cells and TCRvb 6-5+CD8+ T cells over 8 days using the anti-TCRvb 6-5 v1 antibody (100 nM).

[0232] FIG. 34 is a FACS plot showing the showing the expansion of TCRvb 6-5+ T cells over 8 days using anti-TCRvb 6-5 v1 or the anti-CD3ε antibody OKT3.

[0233] FIG. 35A is a bar graph showing the percentage of TCRβV 6-5+ T cells in PBMC cultures after 8 days of culture with the indicated antibody. Data for 5 replicates are shown. FIG. 35B is a bar graph showing the percentage of TCRβV 6-5+ T cells in purified T cell cultures after 8 days of culture with the indicated antibody. Data for 5 replicates are shown.

[0234] FIG. 36A is a bar graph showing the relative count of TCRβV 6-5+ T cells in PBMC culture after 8 days of culture with the indicated antibody. FIG. 36B is a bar graph showing the relative count of TCRβV 6-5+ T cells in PBMC culture after 8 days of culture with the indicated antibody.

[0235] FIG. 37A is a bar graph showing the relative count of TCRβV 6-5+ T cells in a purified T cell culture after 8 days of culture with the indicated antibody. FIG. 37B is a bar graph showing the relative count of TCRβV 6-5+ T cells in a purified T cell culture after 8 days of culture with the indicated antibody.

[0236] FIG. 38 is a line graph showing the total CD3+ T cell count (fold increase) after 8 days of T cell culture with either the anti-CD3ε antibody OKT3 or the anti-TCRvb 6-5 v1 antibody.

[0237] FIG. 39 is a series of line graphs showing the kinetics of target cells by TCRβV 6-5 v1 activated T cells or anti-CD3ε (OKT3) activated T cells. T cells from three different donors were utilized (donor 6769, donor 9880, donor 5411).

[0238] FIG. 40A is a scatter plot showing the percent of target cell lysis by T cells by TCRβV 6-5 v1 activated T cells or anti-CD3ε (OKT3) activated T cells without T cell pre activation. The data is presented at day 6 of co-culture between target cells and effector T cells. FIG. 40B is a scatter plot showing the percent of target cell lysis by T cells by TCRβV 6-5 v1 activated T cells or anti-CD3ε (OKT3) activated T cells with 4 days of T cell pre activation. The data is presented at day 2 of co-culture between target cells and effector T cells (after 4 days of T cell pre-activation).

[0239] FIG. 41 is a scatter plot showing the percent of target cell lysis by T cells by TCRβV 6-5 v1 activated T cells or anti-CD3ε (OKT3) activated T cells with 4 days of T cell pre activation. The data is presented at day 2 of co-culture between target cells and effector T cells (after 4 days of T cell pre-activation).

[0240] FIG. 42 is a bar graph showing target cell lysis by T cells by TCRβV 6-5 v1 activated T cells or anti-CD3ε (OKT3) activated T cells (100 nM each antibody). The data includes seven replicates of each experimental condition.

[0241] FIG. 43 is a series of FACS plots that show the cell surface expression of CD3ε on CD4+ TCRβV 6-5⁻ or CD4+ TCRβV 6-5⁺ T cells activated with either SP34-2 (anti-CD3ε antibody) or anti-TCRβV 6-5 v1 (anti-TCRβV 6-5 antibody) at days 0, 1, 2, 4, 6, or 8 post antibody activation.

[0242] FIG. 44 is a series of FACS plots that show the cell surface expression of CD3ε on CD8+ TCRβV 6-5⁻ or CD8+ TCRβV 6-5⁺ T cells activated with either SP34-2 (anti-CD3ε antibody) or anti-TCRβV 6-5 v1 (anti-TCRβV 6-5 antibody) at days 0, 1, 2, 4, 6, or 8 post antibody activation.

[0243] FIG. 45 is a series of FACS plots that show the cell surface expression of TCRβV on CD4+ TCRβV 6-5⁻ or CD4+ TCRβV 6-5⁺ T cells activated with either SP34-2 (anti-CD3ε antibody) or anti-TCRβV 6-5 v1 (anti-TCRβV 6-5 antibody) at days 0, 1, 2, 4, 6, or 8 post antibody activation.

[0244] FIG. 46 is a series of FACS plots that show the cell surface expression of TCRβV on CD8+ TCRβV 6-5⁻ or CD8+ TCRβV 6-5⁺ T cells activated with either SP34-2 (anti-CD3ε antibody) or anti-TCRβV 6-5 v1 (anti-TCRβV 6-5 antibody) at days 0, 1, 2, 4, 6, or 8 post antibody activation.

[0245] FIG. 47A shows FACS plot of TCRβV 6-5⁺ cynomolgus T cell expansion either unstimulated (left) or stimulated with anti-TCRβV 6-5 v1 (right) 7 days post activation of cynomolgus PBMCs. PBMCs from Donor DW8N (fresh PBMC sample, male, age 8, weight 7.9 kgs) were used. FIG. 47B shows FACS plot of TCRβV 6-5⁺ cynomolgus T cell expansion either unstimulated (left) or stimulated with anti-TCRβV 6-5 v1 (right) 7 days post activation of cynomolgus PBMCs. PBMCs from Donor G709 (cryopreserved sample, male, age 6, weight 4.7 kgs) were used.

[0246] FIG. 48 shows FACS plot and corresponding microscopy images of TCRβV 6-5⁺ cynomolgus T cell expansion either unstimulated (left), stimulated with SP34-2 (anti-CD3ε antibody) (middle); or stimulated with anti-TCRβV 6-5 v1 (right) post activation of cryopreserved donor DW8N cynomolgus PBMCs. The microscopy images show the cell cluster formation (indicated by circles).

[0247] FIG. 49 shows a schematic of FACS plot showing the FACS gating/staining of PBMCs prior γδ T cell purification.

[0248] FIG. 50 shows a schematic of FACS plot showing the FACS gating/staining of purified γδ T cell population.

[0249] FIG. 51 show activation of purified γδ T cell population with anti-CD3ε antibody (SP34-2) (left) or anti-TCRβV antibody (anti-TCRβV 6-5 v1) (right).

[0250] FIG. 52A shows the release of IFNγ from purified γδ T cell populations activated with anti-CD3ε antibody (SP34-2), anti-TCRβV antibody (anti-TCRβV 6-5 v1), or unstimulated. FIG. 52B shows the release of TNFα from purified γδ T cell populations activated with anti-CD3ε antibody (SP34-2), anti-TCRβV antibody (anti-TCRβV 6-5 v1), or unstimulated. FIG. 52C shows the release of IL-2 from purified γδ T cell populations activated with anti-CD3ε antibody (SP34-2), anti-TCRβV antibody (anti-TCRβV 6-5 v1), or unstimulated. FIG. 52D shows the release of IL-17A from purified γδ T cell populations activated with anti-CD3ε antibody (SP34-2), anti-TCRβV antibody (anti-TCRβV 6-5 v1), or unstimulated. FIG. 52E shows the release of IL-1α from purified γδ T cell populations activated with anti-CD3ε antibody (SP34-2), anti-TCRβV antibody (anti-TCRβV 6-5 v1), or unstimulated. FIG. 52F shows the release of IL-1β from purified γδ T cell populations activated with anti-CD3ε antibody (SP34-2), anti-TCRβV antibody (anti-TCRβV 6-5 v1), or unstimulated. FIG. 52G shows the release of IL-6 from purified γδ T cell populations activated with anti-CD3ε antibody (SP34-2), anti-TCRβV antibody (anti-TCRβV 6-5 v1), or unstimulated. FIG. 52H shows the release of IL-10 from purified γδ T cell populations activated with anti-CD3ε antibody (SP34-2), anti-TCRβV antibody (anti-TCRβV 6-5 v1), or unstimulated.

[0251] FIG. 53 shows the relative representations of all TCR alpha V segments (TRAV group of genes) and their variants (top), all TCR beta V segment 6-5 variants (TRBV6-5 gene) (bottom left), and all TCR beta V segments and variants excluding 6-5 (bottom right).

[0252] FIG. 54A is a FACS plot showing phenotypic markers of CD4+ T cells expanded with anti-TCRβV antibody (anti-TCRβV 6-5 v1). Defined phenotypes include TEMRA (top left), Naïve/TSCM (top right), TEM (bottom left), and TCM (bottom right). FIG. 54B is a FACS plot showing phenotypic markers of CD4+ T cells expanded with anti-CD3ε antibody (OKT3). Defined phenotypes include TEMRA (top left), Naïve/TSCM (top right), TEM (bottom left), and TCM (bottom right).

[0253] FIG. 55A is a FACS plot showing phenotypic markers of CD8+ T cells expanded with anti-TCRβV antibody (anti-TCRβV 6-5 v1). Defined phenotypes include TEMRA (top left), Naïve/TSCM (top right), TEM (bottom left), and TCM (bottom right). FIG. 55B is a FACS plot showing phenotypic markers of CD8+ T cells expanded with anti-CD3ε antibody (OKT3). Defined phenotypes include TEMRA (top left), Naïve/TSCM (top right), TEM (bottom left), and TCM (bottom right).

[0254] FIG. 56A is a bar graph showing the percentage of PD1 expressing CD4+ T cells from T cell cultures activated with anti-TCRβV antibody (anti-TCRβV 6-5 v1), anti-CD3ε antibody (OKT3), or unstimulated. FIG. 56B is a bar graph showing the percentage of PD1 expressing CD8+ T cells from T cell cultures activated with anti-TCRβV antibody (anti-TCRβV 6-5 v1), anti-CD3ε antibody (OKT3), or unstimulated.

[0255] FIG. 57A is a bar graph showing the expression of Ki-67 by CD4+ T cells from T cell cultures activated with anti-TCRβV antibody (anti-TCRβV 6-5 v1), anti-CD3ε antibody (OKT3), or unstimulated. FIG. 57B is a bar graph showing the expression of Ki-67 by CD8+ T cells from T cell cultures activated with anti-TCRβV antibody (anti-TCRβV 6-5 v1), anti-CD3ε antibody (OKT3), or unstimulated.

[0256] FIG. 58A is a FACS plot showing the percentage of TEMRA-like CD8+ T cells activated using anti-TCRβV antibody (anti-TCRβV 6-5 v1) that express CD57 (18.7%). FIG. 58B is a FACS plot showing the percentage of TEM-like CD8+ T cells activated using anti-CD3ε antibody (OKT3) that express CD57 (46.8%) and the percentage of TCM-like CD8+ T cells activated using anti-CD3ε antibody (OKT3) that express CD57 (18.9%).

[0257] FIG. 59 shows a series of FACS plots showing the expression of expression of CD27 and by CD4+ (top) or CD8+ (bottom) T cells from T cell cultures activated with anti-TCRβV antibody (anti-TCRβV 6-5 v1), anti-CD3ε antibody (OKT3), or unstimulated.

[0258] FIG. 60 shows a series of FACS plots showing the expression of expression of OX40, 41BB, and ICOS by CD4+(top) or CD8+(bottom) T cells from T cell cultures activated with anti-TCRβV antibody (anti-TCRβV 6-5 v1), anti-CD3ε antibody (OKT3), or unstimulated.

[0259] FIG. 61 shows a series of FACS plots showing the percentage of CD3+(CD4 gated) TCRβV 6-5+ T cells 1, 2, 3, 4, 5, 6, and 8 days port activation with BCMA and the anti-TCR Vβ antibody anti-TCR Vβ 6-5 v1.

[0260] FIG. 62A shows a series of FACS plots showing the percentage of CD4+ T cells expanded using isotype control (IgG1 N297A), anti-TCRβV (anti-TCR Vβ 6-5 v1), or anti-CD3ε (OKT3) antibodies on day 0 post activation. FIG. 62B shows a series of FACS plots showing the percentage of CD4+ T cells expanded using isotype control (IgG1 N297A), anti-TCRβV (anti-TCR Vβ 6-5 v1), or anti-CD3ε (OKT3) antibodies on day 1 post activation. FIG. 62C shows a series of FACS plots showing the percentage of CD4+ T cells expanded using isotype control (IgG1 N297A), anti-TCRβV (anti-TCR Vβ 6-5 v1), or anti-CD3ε (OKT3) antibodies on day 2 post activation. FIG. 62D shows a series of FACS plots showing the percentage of CD4+ T cells expanded using isotype control (IgG1 N297A), anti-TCRβV (anti-TCR Vβ 6-5 v1), or anti-CD3ε (OKT3) antibodies on day 3 post activation. FIG. 62E shows a series of FACS plots showing the percentage of CD4+ T cells expanded using isotype control (IgG1 N297A), anti-TCRβV (anti-TCR Vβ 6-5 v1), or anti-CD3ε (OKT3) antibodies on day 4 post activation. FIG. 62F shows a series of FACS plots showing the percentage of CD4+ T cells expanded using isotype control (IgG1 N297A), anti-TCRβV (anti-TCR Vβ 6-5 v1), or anti-CD3ε (OKT3) antibodies on day 5 post activation. FIG. 62G shows a series of FACS plots showing the percentage of CD4+ T cells expanded using isotype control (IgG1 N297A), anti-TCRβV (anti-TCR Vβ 6-5 v1), or anti-CD3ε (OKT3) antibodies on day 6 post activation. FIG. 62H shows a series of FACS plots showing the percentage of CD4+ T cells expanded using isotype control (IgG1 N297A), anti-TCRβV (anti-TCR Vβ 6-5 v1), or anti-CD3ε (OKT3) antibodies on day 8 post activation.

[0261] FIG. 63A is a bar graph showing ATP production from glycolysis of T cell cultures activated with the indicated antibodies. FIG. 63B is a bar graph showing ATP production from oxidative phosphorylation of T cell cultures activated with the indicated antibodies.

[0262] FIG. 64 is a line graph showing the oxygen consumption rate (OCR) of T cells from about 0 to 75 minutes activated with the indicated antibody.

[0263] FIG. 65A shows the oxygen consumption rate (OCR) of T cells activated with the indicated antibody during basal respiration. FIG. 65B shows the oxygen consumption rate (OCR) of T cells activated with the indicated antibody during maximal respiration. FIG. 65C shows the oxygen consumption rate (OCR) of T cells activated with the indicated antibody during spare respiratory capacity. FIG. 65D is a line graph indicates the areas of basal respiration and maximal respiration as shown in FIG. 64A and FIG. 64B, respectively.

[0264] FIG. 66A is a bar graph showing ATP production from glycolysis of T cell cultures activated with anti-TCRβV 6-5 v1 and re-stimulated with the indicated antibody. FIG. 66B is a bar graph showing ATP production from oxidative phosphorylation of T cell cultures activated with anti-TCRβV 6-5 v1 and re-stimulated with the indicated antibody.

[0265] FIGS. 67A-67G are graphs showing expression of IFNγ (FIG. 67A), TNFα (FIG. 67E), IL-1α (FIG. 67B), IL-1β (FIG. 67C), IL-6 (CRS and neurotoxicity associated cytokines) (FIG. 67D) with BHM1710 (anti TCRVB), a reduced affinity anti CD3 antibody (TB) and the SP34 anti CD3e antibody. IL-10 (FIG. 67F), IL-17A (FIG. 67G).

[0266] FIG. 68 is a FACS plot showing the percentage of NK cells expanded from T cell cultures activated with the indicated antibody.

[0267] FIG. 69 is a bar graph showing the number of NK cells expanded from T cell cultures activated with the indicated antibody.

[0268] FIG. 70 shows a series of FACS plots showing NK cell proliferation induced by T cell cultures activated with the indicated antibody.

[0269] FIG. 71 is a schematic showing an assay described in Example for determining NK cell mediated lysis of target K562 cells.

[0270] FIG. 72 is a bar graph showing the percent target cell lysis mediated by NK cells activated by PBMCs activated with the indicated antibody.

[0271] FIG. 73 shows a series of FACS plots showing the proliferation of NK cells from PBMC cultures activated/expanded with the indicated antibody (isotype control or OKT3). PBMCs from three donors (D1, D2, and D3) were analyzed.

[0272] FIG. 74 shows a series of FACS plots showing the proliferation of NK cells from PBMC cultures activated/expanded with the indicated antibody (anti-TCRvβ 12-3/4 v1 or anti-TCRvβ 12-3/4 v2). PBMCs from three donors (D1, D2, and D3) were analyzed.

[0273] FIG. 75 shows a series of FACS plots showing the proliferation of NK cells from PBMC cultures activated/expanded with the indicated antibody (anti-TCRvβ 12-3/4 v3 or SP34-2). PBMCs from three donors (D1, D2, and D3) were analyzed.

[0274] FIG. 76 is a bar graph showing the level of secreted IFNγ by T cells activated/expanded with the indicated antibody (anti-TCRβV 6-5 v1, OKT3, or SP34) and cultured with said antibody for the indicated number of days (1, 3, or 5).

[0275] FIG. 77 is a bar graph showing the level of secreted IL-2 by T cells activated/expanded with the indicated antibody (anti-TCRβV 6-5 v1, OKT3, or SP34) and cultured with said antibody for the indicated number of days (1, 3, or 5).

[0276] FIG. 78 is a bar graph showing the level of secreted IL-15 by T cells activated/expanded with the indicated antibody (anti-TCRβV 6-5 v1, OKT3, or SP34) and cultured with said antibody for the indicated number of days (1, 3, or 5).

[0277] FIG. 79 is a bar graph showing the level of secreted IL-1β by T cells activated/expanded with the indicated antibody (anti-TCRβV 6-5 v1, OKT3, or SP34) and cultured with said antibody for the indicated number of days (1, 3, or 5).

[0278] FIG. 80 is a bar graph showing the level of secreted IL-6 by T cells activated/expanded with the indicated antibody (anti-TCRβV 6-5 v1, OKT3, or SP34) and cultured with said antibody for the indicated number of days (1, 3, or 5).

[0279] FIG. 81 is a bar graph showing the level of secreted IL-10 by T cells activated/expanded with the indicated antibody (anti-TCRβV 6-5 v1, OKT3, or SP34) and cultured with said antibody for the indicated number of days (1, 3, or 5).

[0280] FIG. 82 is a bar graph showing the level of the indicated cytokine secreted by T cells activated/expanded with the indicated antibody (anti-TCRβV 6-5 v1 or SP34). The data includes use of 17 individual PBMC donors.

[0281] FIG. 83A is a bar graph showing the level of secreted IFNγ by T cells activated/expanded with the indicated antibody (anti-TCRβV 6-5 v1 or OKT3) and cultured with said antibody for the indicated number of days (1, 2, 3, 5, or 6). FIG. 83B is a bar graph showing the level of secreted IL-11 by T cells activated/expanded with the indicated antibody (anti-TCRβV 6-5 v1 or OKT3) and cultured with said antibody for the indicated number of days (1, 2, 3, 5, or 6). FIG. 83C is a bar graph showing the level of secreted IL-4 by T cells activated/expanded with the indicated antibody (anti-TCRβV 6-5 v1 or OKT3) and cultured with said antibody for the indicated number of days (1, 2, 3, 5, or 6). FIG. 83D is a bar graph showing the level of secreted IL-6 by T cells activated/expanded with the indicated antibody (anti-TCRβV 6-5 v1 or OKT3) and cultured with said antibody for the indicated number of days (1, 2, 3, 5, or 6). FIG. 83E is a bar graph showing the level of secreted IL-10 by T cells activated/expanded with the indicated antibody (anti-TCRβV 6-5 v1 or OKT3) and cultured with said antibody for the indicated number of days (1, 2, 3, 5, or 6). FIG. 83F is a bar graph showing the level of secreted TNFα by T cells activated/expanded with the indicated antibody (anti-TCRβV 6-5 v1 or OKT3) and cultured with said antibody for the indicated number of days (1, 2, 3, 5, or 6). FIG. 83G is a bar graph showing the level of secreted IL-2 by T cells activated/expanded with the indicated antibody (anti-TCRβV 6-5 v1 or OKT3) and cultured with said antibody for the indicated number of days (1, 2, 3, 5, or 6).

[0282] FIG. 84A is a bar graph showing the level of secreted IFNγ by T cells activated/expanded with the indicated antibody (anti-TCRβV 6-5 v1, anti-TCRβV 6-5 v1, OKT3, SP34-2, or isotype control) and cultured with said antibody for the indicated number of days (1, 2, 3, 5, or 6). FIG. 84B is a bar graph showing the level of secreted IL-1β by T cells activated/expanded with the indicated antibody (anti-TCRβV 6-5 v1, anti-TCRβV 6-5 v1, OKT3, SP34-2, or isotype control) and cultured with said antibody for the indicated number of days (1, 2, 3, 5, or 6). FIG. 84C is a bar graph showing the level of secreted IL-4 by T cells activated/expanded with the indicated antibody (anti-TCRβV 6-5 v1, anti-TCRβV 6-5 v1, OKT3, SP34-2, or isotype control) and cultured with said antibody for the indicated number of days (1, 2, 3, 5, or 6). FIG. 84D is a bar graph showing the level of secreted IL-6 by T cells activated/expanded with the indicated antibody (anti-TCRβV 6-5 v1, anti-TCRβV 6-5 v1, OKT3, SP34-2, or isotype control) and cultured with said antibody for the indicated number of days (1, 2, 3, 5, or 6). FIG. 84E is a bar graph showing the level of secreted IL-10 by T cells activated/expanded with the indicated antibody (anti-TCRβV 6-5 v1, anti-TCRβV 6-5 v1, OKT3, SP34-2, or isotype control) and cultured with said antibody for the indicated number of days (1, 2, 3, 5, or 6). FIG. 84F is a bar graph showing the level of secreted TNFα by T cells activated/expanded with the indicated antibody (anti-TCRβV 6-5 v1, anti-TCRβV 6-5 v1, OKT3, SP34-2, or isotype control) and cultured with said antibody for the indicated number of days (1, 2, 3, 5, or 6). FIG. 84G is a bar graph showing the level of secreted IL-2 by T cells activated/expanded with the indicated antibody (anti-TCRβV 6-5 v1, anti-TCRβV 6-5 v1, OKT3, SP34-2, or isotype control) and cultured with said antibody for the indicated number of days (1, 2, 3, 5, or 6).

[0283] FIG. 85A is a bar graph showing the level of secreted IFNγ by T cells activated/expanded with the indicated antibody (anti-TCRβV 6-5 v1, anti-TCRβV 6-5 v1, OKT3, or SP34-2) and cultured with said antibody for the indicated number of days (1, 2, 3, 4, 5, 6, or 8). FIG. 85B is a bar graph showing the level of secreted IL-1β by T cells activated/expanded with the indicated antibody (anti-TCRβV 6-5 v1, anti-TCRβV 6-5 v1, OKT3, or SP34-2) and cultured with said antibody for the indicated number of days (1, 2, 3, 4, 5, 6, or 8). FIG. 85C is a bar graph showing the level of secreted IL-4 by T cells activated/expanded with the indicated antibody (anti-TCRβV 6-5 v1, anti-TCRβV 6-5 v1, OKT3, or SP34-2) and cultured with said antibody for the indicated number of days (1, 2, 3, 4, 5, 6, or 8). FIG. 85D is a bar graph showing the level of secreted IL-6 by T cells activated/expanded with the indicated antibody (anti-TCRβV 6-5 v1, anti-TCRβV 6-5 v1, OKT3, or SP34-2) and cultured with said antibody for the indicated number of days (1, 2, 3, 4, 5, 6, or 8). FIG. 85E is a bar graph showing the level of secreted IL-10 by T cells activated/expanded with the indicated antibody (anti-TCRβV 6-5 v1, anti-TCRβV 6-5 v1, OKT3, or SP34-2) and cultured with said antibody for the indicated number of days (1, 2, 3, 4, 5, 6, or 8). FIG. 85F is a bar graph showing the level of secreted TNFα by T cells activated/expanded with the indicated antibody (anti-TCRβV 6-5 v1, anti-TCRβV 6-5 v1, OKT3, or SP34-2) and cultured with said antibody for the indicated number of days (1, 2, 3, 4, 5, 6, or 8). FIG. 85G is a bar graph showing the level of secreted IL-2 by T cells activated/expanded with the indicated antibody (anti-TCRβV 6-5 v1, anti-TCRβV 6-5 v1, OKT3, or SP34-2) and cultured with said antibody for the indicated number of days (1, 2, 3, 4, 5, 6, or 8).

[0284] FIG. 86A is a bar graph showing the level of secreted IL-17A by T cells activated/expanded with the indicated antibody (anti-TCRβV 6-5 v1, OKT3, or SP34-2) and cultured with said antibody for the indicated number of days (2, 5, or 7). FIG. 86B is a bar graph showing the level of secreted IL-17A by T cells activated/expanded with the indicated antibody (anti-TCRβV 6-5 v1, OKT3, or SP34-2) and cultured with said antibody for the indicated number of days (2, 5, or 8). FIG. 86C is a bar graph showing the level of secreted IL-17A by T cells activated/expanded with the indicated antibody (anti-TCRβV 6-5 v1, OKT3, or SP34-2) and cultured with said antibody for the indicated number of days (2, 5, or 7). FIG. 86D is a bar graph showing the level of secreted IL-17A by T cells activated/expanded with the indicated antibody (anti-TCRβV 6-5 v1 or SP34-2) and cultured with said antibody for the indicated number of days (1, 3, 5, or 7).

[0285] FIG. 87A is a bar graph showing the level of secreted IFNγ by T cells activated/expanded with the indicated antibody (isotype control; anti-TCRβV 6-5 v1 with anti-BCMA antibody; anti-TCRβV 6-5 v1; anti-TCRβV 123/4 v1, or SP34-2) and cultured with said antibody for the indicated number of days (1, 2, 3, 4, 5, 6, or 8). FIG. 87B is a bar graph showing the level of secreted IL-1β by T cells activated/expanded with the indicated antibody (isotype control; anti-TCRβV 6-5 v1 with anti-BCMA antibody; anti-TCRβV 6-5 v1; anti-TCRβV 123/4 v1, or SP34-2) and cultured with said antibody for the indicated number of days (1, 2, 3, 4, 5, 6, or 8). FIG. 87C is a bar graph showing the level of secreted IL-4 by T cells activated/expanded with the indicated antibody (isotype control; anti-TCRβV 6-5 v1 with anti-BCMA antibody; anti-TCRβV 6-5 v1; anti-TCRβV 123/4 v1, or SP34-2) and cultured with said antibody for the indicated number of days (1, 2, 3, 4, 5, 6, or 8). FIG. 87D is a bar graph showing the level of secreted IL-6 by T cells activated/expanded with the indicated antibody (isotype control; anti-TCRβV 6-5 v1 with anti-BCMA antibody; anti-TCRβV 6-5 v1; anti-TCRβV 123/4 v1, or SP34-2) and cultured with said antibody for the indicated number of days (1, 2, 3, 4, 5, 6, or 8). FIG. 87E is a bar graph showing the level of secreted IL-10 by T cells activated/expanded with the indicated antibody (isotype control; anti-TCRβV 6-5 v1 with anti-BCMA antibody; anti-TCRβV 6-5 v1; anti-TCRβV 123/4 v1, or SP34-2) and cultured with said antibody for the indicated number of days (1, 2, 3, 4, 5, 6, or 8).

[0286] FIG. 87F is a bar graph showing the level of secreted TNFα by T cells activated/expanded with the indicated antibody (isotype control; anti-TCRβV 6-5 v1 with anti-BCMA antibody; anti-TCRβV 6-5 v1; anti-TCRβV 123/4 v1, or SP34-2) and cultured with said antibody for the indicated number of days (1, 2, 3, 4, 5, 6, or 8). FIG. 87G is a bar graph showing the level of secreted IL-2 by T cells activated/expanded with the indicated antibody (isotype control; anti-TCRβV 6-5 v1 with anti-BCMA antibody; anti-TCRβV 6-5 v1; anti-TCRβV 123/4 v1, or SP34-2) and cultured with said antibody for the indicated number of days (1, 2, 3, 4, 5, 6, or 8). FIG. 87H is a bar graph showing the level of secreted IL-12p70 by T cells activated/expanded with the indicated antibody (isotype control; anti-TCRβV 6-5 v1 with anti-BCMA antibody; anti-TCRβV 6-5 v1; anti-TCRβV 123/4 v1, or SP34-2) and cultured with said antibody for the indicated number of days (1, 2, 3, 4, 5, 6, or 8). FIG. 87I is a bar graph showing the level of secreted IL-13 by T cells activated/expanded with the indicated antibody (isotype control; anti-TCRβV 6-5 v1 with anti-BCMA antibody; anti-TCRβV 6-5 v1; anti-TCRβV 123/4 v1, or SP34-2) and cultured with said antibody for the indicated number of days (1, 2, 3, 4, 5, 6, or 8). FIG. 87J is a bar graph showing the level of secreted IL-8 by T cells activated/expanded with the indicated antibody (isotype control; anti-TCRβV 6-5 v1 with anti-BCMA antibody; anti-TCRβV 6-5 v1; anti-TCRβV 123/4 v1, or SP34-2) and cultured with said antibody for the indicated number of days (1, 2, 3, 4, 5, 6, or 8). FIG. 87K is a bar graph showing the level of secreted exotoxin by T cells activated/expanded with the indicated antibody (isotype control; anti-TCRβV 6-5 v1 with anti-BCMA antibody; anti-TCRβV 6-5 v1; anti-TCRβV 123/4 v1, or SP34-2) and cultured with said antibody for the indicated number of days (1, 2, 3, 4, 5, 6, or 8). FIG. 87L is a bar graph showing the level of secreted exotoxin-3 by T cells activated/expanded with the indicated antibody (isotype control; anti-TCRβV 6-5 v1 with anti-BCMA antibody; anti-TCRβV 6-5 v1; anti-TCRβV 123/4 v1, or SP34-2) and cultured with said antibody for the indicated number of days (1, 2, 3, 4, 5, 6, or 8). FIG. 87M is a bar graph showing the level of secreted IL-8 by T cells activated/expanded with the indicated antibody (isotype control; anti-TCRβV 6-5 v1 with anti-BCMA antibody; anti-TCRβV 6-5 v1; anti-TCRβV 123/4 v1, or SP34-2) and cultured with said antibody for the indicated number of days (1, 2, 3, 4, 5, 6, or 8). FIG. 87N is a bar graph showing the level of secreted IP-10 by T cells activated/expanded with the indicated antibody (isotype control; anti-TCRβV 6-5 v1 with anti-BCMA antibody; anti-TCRβV 6-5 v1; anti-TCRβV 123/4 v1, or SP34-2) and cultured with said antibody for the indicated number of days (1, 2, 3, 4, 5, 6, or 8). FIG. 87O is a bar graph showing the level of secreted MCP-1 by T cells activated/expanded with the indicated antibody (isotype control; anti-TCRβV 6-5 v1 with anti-BCMA antibody; anti-TCRβV 6-5 v1; anti-TCRβV 123/4 v1, or SP34-2) and cultured with said antibody for the indicated number of days (1, 2, 3, 4, 5, 6, or 8). FIG. 87P is a bar graph showing the level of secreted MCP-4 by T cells activated/expanded with the indicated antibody (isotype control; anti-TCRβV 6-5 v1 with anti-BCMA antibody; anti-TCRβV 6-5 v1; anti-TCRβV 123/4 v1, or SP34-2) and cultured with said antibody for the indicated number of days (1, 2, 3, 4, 5, 6, or 8). FIG. 87Q is a bar graph showing the level of secreted MDC by T cells activated/expanded with the indicated antibody (isotype control; anti-TCRβV 6-5 v1 with anti-BCMA antibody; anti-TCRβV 6-5 v1; anti-TCRβV 123/4 v1, or SP34-2) and cultured with said antibody for the indicated number of days (1, 2, 3, 4, 5, 6, or 8).

[0287] FIG. 87R is a bar graph showing the level of secreted MIP-1α by T cells activated/expanded with the indicated antibody (isotype control; anti-TCRβV 6-5 v1 with anti-BCMA antibody; anti-TCRβV 6-5 v1; anti-TCRβV 123/4 v1, or SP34-2) and cultured with said antibody for the indicated number of days (1, 2, 3, 4, 5, 6, or 8). FIG. 87S is a bar graph showing the level of secreted MIP-1b by T cells activated/expanded with the indicated antibody (isotype control; anti-TCRβV 6-5 v1 with anti-BCMA antibody; anti-TCRβV 6-5 v1; anti-TCRβV 123/4 v1, or SP34-2) and cultured with said antibody for the indicated number of days (1, 2, 3, 4, 5, 6, or 8). FIG. 87T is a bar graph showing the level of secreted TARC by T cells activated/expanded with the indicated antibody (isotype control; anti-TCRβV 6-5 v1 with anti-BCMA antibody; anti-TCRβV 6-5 v1; anti-TCRβV 123/4 v1, or SP34-2) and cultured with said antibody for the indicated number of days (1, 2, 3, 4, 5, 6, or 8). FIG. 87U is a bar graph showing the level of secreted GMCSF by T cells activated/expanded with the indicated antibody (isotype control; anti-TCRβV 6-5 v1 with anti-BCMA antibody; anti-TCRβV 6-5 v1; anti-TCRβV 123/4 v1, or SP34-2) and cultured with said antibody for the indicated number of days (1, 2, 3, 4, 5, 6, or 8). FIG. 87V is a bar graph showing the level of secreted IL-12-23p40 by T cells activated/expanded with the indicated antibody (isotype control; anti-TCRβV 6-5 v1 with anti-BCMA antibody; anti-TCRβV 6-5 v1; anti-TCRβV 123/4 v1, or SP34-2) and cultured with said antibody for the indicated number of days (1, 2, 3, 4, 5, 6, or 8). FIG. 87W is a bar graph showing the level of secreted IL-15 by T cells activated/expanded with the indicated antibody (isotype control; anti-TCRβV 6-5 v1 with anti-BCMA antibody; anti-TCRβV 6-5 v1; anti-TCRβV 123/4 v1, or SP34-2) and cultured with said antibody for the indicated number of days (1, 2, 3, 4, 5, 6, or 8). FIG. 87X is a bar graph showing the level of secreted IL-16 by T cells activated/expanded with the indicated antibody (isotype control; anti-TCRβV 6-5 v1 with anti-BCMA antibody; anti-TCRβV 6-5 v1; anti-TCRβV 123/4 v1, or SP34-2) and cultured with said antibody for the indicated number of days (1, 2, 3, 4, 5, 6, or 8). FIG. 87Y is a bar graph showing the level of secreted IL-17a by T cells activated/expanded with the indicated antibody (isotype control; anti-TCRβV 6-5 v1 with anti-BCMA antibody; anti-TCRβV 6-5 v1; anti-TCRβV 123/4 v1, or SP34-2) and cultured with said antibody for the indicated number of days (1, 2, 3, 4, 5, 6, or 8). FIG. 87Z is a bar graph showing the level of secreted IL-1α by T cells activated/expanded with the indicated antibody (isotype control; anti-TCRβV 6-5 v1 with anti-BCMA antibody; anti-TCRβV 6-5 v1; anti-TCRβV 123/4 v1, or SP34-2) and cultured with said antibody for the indicated number of days (1, 2, 3, 4, 5, 6, or 8). FIG. 87AA is a bar graph showing the level of secreted IL-5 by T cells activated/expanded with the indicated antibody (isotype control; anti-TCRβV 6-5 v1 with anti-BCMA antibody; anti-TCRβV 6-5 v1; anti-TCRβV 123/4 v1, or SP34-2) and cultured with said antibody for the indicated number of days (1, 2, 3, 4, 5, 6, or 8). FIG. 87BB is a bar graph showing the level of secreted IL-7 by T cells activated/expanded with the indicated antibody (isotype control; anti-TCRβV 6-5 v1 with anti-BCMA antibody; anti-TCRβV 6-5 v1; anti-TCRβV 123/4 v1, or SP34-2) and cultured with said antibody for the indicated number of days (1, 2, 3, 4, 5, 6, or 8). FIG. 87CC is a bar graph showing the level of secreted TNF-β by T cells activated/expanded with the indicated antibody (isotype control; anti-TCRβV 6-5 v1 with anti-BCMA antibody; anti-TCRβV 6-5 v1; anti-TCRβV 123/4 v1, or SP34-2) and cultured with said antibody for the indicated number of days (1, 2, 3, 4, 5, 6, or 8). FIG. 87DD is a bar graph showing the level of secreted VEGF by T cells activated/expanded with the indicated antibody (isotype control; anti-TCRβV 6-5 v1 with anti-BCMA antibody; anti-TCRβV 6-5 v1; anti-TCRβV 123/4 v1, or SP34-2) and cultured with said antibody for the indicated number of days (1, 2, 3, 4, 5, 6, or 8).

[0288] FIG. 88 shows a graphical representation of the relation of sequences between different TCRVB clonotype subfamilies.

[0289] FIG. 89A is a bar graph showing the percentage of cytokine release from PBMCs activated/expanded for eight days using the indicated antibody (anti-TCRβV 12-3/4 v1 or SP34-2). FIG. 89B is a bar graph showing the percentage of cytokine release from PBMCs activated/expanded for eight days using the indicated antibody (anti-TCRβV 5 or SP34-2). FIG. 89C is a bar graph showing the percentage of cytokine release from PBMCs activated/expanded for eight days using the indicated antibody (anti-TCRβV 10 or SP34-2).

[0290] FIG. 90A a bar graph showing the level of secreted IFNγ by T cells activated/expanded with the indicated antibody for the indicated number of days (3 or 6). FIG. 90B a bar graph showing the level of secreted IL-10 by T cells activated/expanded with the indicated antibody for the indicated number of days (3 or 6). FIG. 90C a bar graph showing the level of secreted IL-17A by T cells activated/expanded with the indicated antibody for the indicated number of days (3 or 6). FIG. 90D a bar graph showing the level of secreted IL-1α by T cells activated/expanded with the indicated antibody for the indicated number of days (3 or 6). FIG. 90E a bar graph showing the level of secreted IL-1β by T cells activated/expanded with the indicated antibody for the indicated number of days (3 or 6). FIG. 90F a bar graph showing the level of secreted IL-6 by T cells activated/expanded with the indicated antibody for the indicated number of days (3 or 6). FIG. 90G a bar graph showing the level of secreted TNFα by T cells activated/expanded with the indicated antibody for the indicated number of days (3 or 6). FIG. 90H a bar graph showing the level of secreted IL-2 by T cells activated/expanded with the indicated antibody for the indicated number of days (3 or 6).

[0291] FIG. 91 is a bar graph summarizing data from FACS analysis of PBMCs activated/expanded for 6 days using the indicated anti-TCRVβ antibody.

[0292] FIG. 92A a bar graph showing the level of secreted IFNγ by T cells activated/expanded with the indicated antibody for the indicated number of days (1, 3, 5, or 7). FIG. 92B a bar graph showing the level of secreted IL-10 by T cells activated/expanded with the indicated antibody for the indicated number of days (1, 3, 5, or 7). FIG. 92C a bar graph showing the level of secreted IL-17A by T cells activated/expanded with the indicated antibody for the indicated number of days (1, 3, 5, or 7). FIG. 92D a bar graph showing the level of secreted IL-1α by T cells activated/expanded with the indicated antibody for the indicated number of days (1, 3, 5, or 7). FIG. 92E a bar graph showing the level of secreted IL-1β by T cells activated/expanded with the indicated antibody for the indicated number of days (1, 3, 5, or 7). FIG. 92F a bar graph showing the level of secreted IL-6 by T cells activated/expanded with the indicated antibody for the indicated number of days (1, 3, 5, or 7). FIG. 92G a bar graph showing the level of secreted IL-4 by T cells activated/expanded with the indicated antibody for the indicated number of days (1, 3, 5, or 7). FIG. 92H a bar graph showing the level of secreted IL-2 by T cells activated/expanded with the indicated antibody for the indicated number of days (1, 3, 5, or 7).

[0293] FIG. 93 is a bar graph summarizing data from FACS analysis of PBMCs activated/expanded for 7 days using the indicated anti-TCRVβ antibody.

[0294] FIG. 94A is a bar graph showing the level of secreted IFNγ by T cells activated/expanded with the indicated antibody for the indicated number of days (3 or 6). FIG. 94B a bar graph showing the level of secreted IL-10 by T cells activated/expanded with the indicated antibody for the indicated number of days (3 or 6). FIG. 94C a bar graph showing the level of secreted IL-17A by T cells activated/expanded with the indicated antibody for the indicated number of days (3 or 6). FIG. 94D a bar graph showing the level of secreted IL-1α by T cells activated/expanded with the indicated antibody for the indicated number of days (3 or 6). FIG. 94E a bar graph showing the level of secreted IL-1β by T cells activated/expanded with the indicated antibody for the indicated number of days (3 or 6). FIG. 94F a bar graph showing the level of secreted IL-6 by T cells activated/expanded with the indicated antibody for the indicated number of days (3 or 6). FIG. 94G a bar graph showing the level of secreted IL-4 by T cells activated/expanded with the indicated antibody for the indicated number of days (3 or 6). FIG. 94H a bar graph showing the level of secreted TNFα by T cells activated/expanded with the indicated antibody for the indicated number of days (3 or 6). FIG. 94I a bar graph showing the level of secreted IL-2 by T cells activated/expanded with the indicated antibody for the indicated number of days (3 or 6).

[0295] FIG. 95A is a bar graph showing the level of secreted IFN-γ by T cells activated/expanded with the indicated antibody (anti-TCRβV 6-5 v1 (plate coated), anti-CD3e (plate coated), anti-TCRβV 6-5 v1 (in solution), or anti-CD3ε (in solution) and cultured with said antibody for the indicated number of days (1, 3, 5, or 7). FIG. 95B is a bar graph showing the level of secreted IFN-γ by T cells activated/expanded with the indicated antibody (anti-TCRβV 6-5 v1 (plate coated), anti-CD3ε (plate coated), anti-TCRβV 6-5 v1 (in solution), or anti-CD3ε (in solution) and cultured with said antibody for the indicated number of days (1, 3, 5, or 7). FIG. 95C is a bar graph showing the level of secreted IL-1b by T cells activated/expanded with the indicated antibody (anti-TCRβV 6-5 v1 (plate coated), anti-CD3ε (plate coated), anti-TCRβV 6-5 v1 (in solution), or anti-CD3ε (in solution) and cultured with said antibody for the indicated number of days (1, 3, 5, or 7). FIG. 95D is a bar graph showing the level of secreted IL-6 by T cells activated/expanded with the indicated antibody (anti-TCRβV 6-5 v1 (plate coated), anti-CD3ε (plate coated), anti-TCRβV 6-5 v1 (in solution), or anti-CD3ε (in solution) and cultured with said antibody for the indicated number of days (1, 3, 5, or 7). FIG. 95E is a bar graph showing the level of secreted IL-10 by T cells activated/expanded with the indicated antibody (anti-TCRβV 6-5 v1 (plate coated), anti-CD3ε (plate coated), anti-TCRβV 6-5 v1 (in solution), or anti-CD3ε (in solution) and cultured with said antibody for the indicated number of days (1, 3, 5, or 7). FIG. 95F is a bar graph showing the level of secreted IL-15 by T cells activated/expanded with the indicated antibody (anti-TCRβV 6-5 v1 (plate coated), anti-CD3ε (plate coated), anti-TCRβV 6-5 v1 (in solution), or anti-CD3ε (in solution) and cultured with said antibody for the indicated number of days (1, 3, 5, or 7). FIG. 95G is a bar graph showing the level of secreted IL-17A by T cells activated/expanded with the indicated antibody (anti-TCRβV 6-5 v1 (plate coated), anti-CD3ε (plate coated), anti-TCRβV 6-5 v1 (in solution), or anti-CD3ε (in solution) and cultured with said antibody for the indicated number of days (1, 3, 5, or 7). FIG. 95H is a bar graph showing the level of secreted IL-1a by T cells activated/expanded with the indicated antibody (anti-TCRβV 6-5 v1 (plate coated), anti-CD3ε (plate coated), anti-TCRβV 6-5 v1 (in solution), or anti-CD3ε (in solution) and cultured with said antibody for the indicated number of days (1, 3, 5, or 7). FIG. 95I is a bar graph showing the level of secreted IL-1b by T cells activated/expanded with the indicated antibody (anti-TCRβV 6-5 v1 (plate coated), anti-CD3ε (plate coated), anti-TCRβV 6-5 v1 (in solution), or anti-CD3ε (in solution) and cultured with said antibody for the indicated number of days (1, 3, 5, or 7). FIG. 95J is a bar graph showing the level of secreted IL-2 by T cells activated/expanded with the indicated antibody (anti-TCRβV 6-5 v1 (plate coated), anti-CD3ε (plate coated), anti-TCRβV 6-5 v1 (in solution), or anti-CD3ε (in solution) and cultured with said antibody for the indicated number of days (1, 3, 5, or 7). FIG. 95K is a bar graph showing the level of secreted IL-4 by T cells activated/expanded with the indicated antibody (anti-TCRβV 6-5 v1 (plate coated), anti-CD3ε (plate coated), anti-TCRβV 6-5 v1 (in solution), or anti-CD3ε (in solution) and cultured with said antibody for the indicated number of days (1, 3, 5, or 7). FIG. 95L is a bar graph showing the level of secreted TNF-a by T cells activated/expanded with the indicated antibody (anti-TCRβV 6-5 v1 (plate coated), anti-CD3ε (plate coated), anti-TCRβV 6-5 v1 (in solution), or anti-CD3ε (in solution) and cultured with said antibody for the indicated number of days (1, 3, 5, or 7).

[0296] FIG. 96 is a FACS plot showing the showing the ability of MH3-2 to bind PBMCs from one of two donors when the PBMCs are either preincubated with TM23 or not (MH3-2 Alone).

[0297] FIG. 97 is a FACS plot showing the ability of MH3-2 to bind PBMCs from one of two donors when the PBMCs are either preincubated with TM23 or not (MH3-2 Alone).

[0298] FIG. 98A is a bar graph showing the polyfunctional strength index (PSI) of PBMC CD4+ T cells, CD4+ T cells expanded with anti-CD3 antibody, (CD3 Expanded T cells), and CD4+ T cells expanded with anti-TCRVβ 6-5 antibody (Drug Expanded T cells). The Effector mediators are Granzyme B, IFNγ, MIP-1α, perform, TNFα, and TNFβ. The Stimulatory mediators are IL-5. The Chemoattractive mediators are MIP-1b. FIG. 98B is a bar graph showing the polyfunctional strength index (PSI) of PBMC CD8+ T cells, CD8+ T cells expanded with anti-CD3 antibody, (CD3 Expanded T cells), and CD8+ T cells expanded with anti-TCRVβ 6-5 antibody (Drug Expanded T cells). The Effector mediators are Granzyme B, IFNγ, MIP-1α, perform, and TNFβ. The Chemoattractive mediators are MIP-1b and RANTES.

[0299] FIG. 99 is a schematic of the experimental design for the pharmacokinetic (PK) profile and dosing strategy of the multifunctional polypeptide molecule as described herein.

[0300] FIG. 100 shows Table 9, which depicts alignment of TCRBV amino acid sequences (SEQ ID NOS 3457-3516, 3669-3673, 3522, 3674-3675, 3525, 3676-3687, 3538, 3688-3698, 3550-3639 and 3699-3790, respectively, in order of appearance). The alignment of TCRBV amino acid sequences in Table 9 underscores the diversity of TCR sequences. In particular, the TRBV sequences from different subfamilies are considerably different from each other.

[0301] FIG. 101 shows alignment of affinity matured humanized Antibody A-H VL sequences (SEQ ID NOS: 3377-3389, respectively, in order of appearance).

[0302] FIG. 102 shows alignment of affinity matured humanized Antibody A-H VH sequences (SEQ ID NOS: 3390-3436, respectively, in order of appearance).

[0303] FIG. 103A shows an exemplary embodiment (e.g., BKM0186) of multifunctional molecules comprising a TCRβV-binding moiety and a cytokine polypeptide (e.g., IL2 or IL2-C125A) as described herein. FIG. 103B shows an exemplary embodiment of multifunctional molecules comprising a TCRβV-binding moiety and a cytokine polypeptide as described herein. FIGS. 103C, 103D, 103E, and 103F show exemplary embodiments of multifunctional molecules comprising a first TCRβV-binding moiety, a second TCRβV-binding moiety, and two cytokine polypeptides as described herein. In some embodiments, the cytokine polypeptide comprises IL-2 or a functional fragment or a functional variant thereof, IL2-C125A or a functional fragment or a functional variant thereof, IL-15 or a functional fragment or a functional variant thereof, IL-7 or a functional fragment or a functional variant thereof, IL-12 or a functional fragment or a functional variant thereof, or IL-21 or a functional fragment or a functional variant thereof. In embodiments, the cytokine polypeptide further comprises a cytokine receptor. In some embodiments, the cytokine polypeptide comprises IL-15 linked to a IL-15Ra. In some embodiments, the cytokine polypeptide comprises IL-15 linked to a IL-15Ra sushi domain. In some embodiments, the cytokine polypeptide comprises a cytokine dimer. In some embodiments, the cytokine polypeptide comprises an IL-12 beta subunit linked to an IL-12 alpha subunit.

[0304] FIG. 104 shows FACS plots showing binding of BKM0186 to different immune cell populations in Human PBMCs.

[0305] FIG. 105 shows binding of BKM0186 to pure human T cells expressing either Vβ6 or CD25 (IL-2Ra) or both.

[0306] FIG. 106 shows in vitro concentration-effect relationships for BKM0186-mediated in vitro expansion of Vβ6 T cells and activated (CD25) Vβ6 T cells from human PBMCs at day 5 as a % of total T-Cytotoxic (CD8) and T-helper (CD4) populations. Left graph: T-cytotoxic lymphocytes; right graph: T-helper lymphocytes.

[0307] FIG. 107 shows in vitro TCR sequencing. PBMCs were incubated with 100 nM of BKM0186 for 5 days and T cells were sequenced for TCR β chain V (TRBV) genes. Compared to unstimulated T cells (grey), BKM0186 selectively expanded T cells bearing TRBV6-1, TRBV6-2, TRBV6-3, TRBV6-5, and TRBV10-3.

[0308] FIG. 108A and FIG. 108B show a series of graphs (FIG. 108A) and a series of FACS plots (FIG. 108B) exhibiting activation of CD4+ and CD8+ T cells as assessed by CD25 expression following stimulation with BKM0186, RSV-IL2 and Anti-TCRVβ6 control in solution.

[0309] FIG. 109 shows a series of FACS plots demonstrating differentiation of memory T cells mediated by BKM0186 in comparison to unstimulated and the controls RSV-IL2 and anti-TCRVβ6. Upper left quadrant represents Central memory (CM), lower left quadrant represents Effector memory (EM), upper right quadrant represents Naïve (N) and lower right quadrant represents Effector memory RA (TEMRA).

[0310] FIG. 110 shows in vitro concentration-effect relationships for BKM0186-induced cytokine release from human PBMCs at day 4 using MSD V-plex human cytokine panel.

[0311] FIG. 111 shows BKM0186-mediated killing of human tumor organoids generated from primary, patient-derived tissue from colorectal and NSCLC cancer patients. Vertical bars represent percentage of organoid area reduced relative to isotype control following incubation of organoids with BKM0186 and autologous TILs.

[0312] FIG. 112 shows tumor growth curves of mBKM0186-treated EMT6 tumor-bearing mice. Studies were performed in randomized mice with tumor volumes of 80-150 mm³. For all models except MC38, mice were dosed for 3 weeks with a weekly dosing of 0.5-1.5 mg/kg and survival was determined based on 2000 mm³ tumor volume end point.

[0313] FIG. 113 shows tumor growth curves of mBKM0186-treated mice. Studies were performed in randomized mice with tumor volumes of 80-150 mm³. For all models except MC38, mice were dosed for 4 weeks with a weekly dosing of 1-1.5 mg/kg and survival was determined based on 2000 mm³ tumor volume end point. For MC38, mice were given first dose of 3 mg/kg followed by 1 mg/kg for subsequent three weekly (QW) doses.

[0314] FIG. 114 shows Kaplan-Meier survival curves of treated mice. Studies were performed in randomized mice with tumor volumes of 80-150 mm³. For all models except MC38, mice were dosed for 4 weeks with a weekly dosing of 1-1.5 mg/kg and survival was determined based on 2000 mm³ tumor volume end point. For MC38, mice were given first dose of 3 mg/kg followed by 1 mg/kg for subsequent three weekly (QW) doses.

[0315] FIG. 115 shows the experimental design for the tumor rechallenge study. Cured EMT6 tumor bearing mice were rechallenged with EMT6 tumor cells in one flank and CT26 tumor cells in another flank and monitored for tumor growth for 28 days.

[0316] FIG. 116 shows the results of the tumor rechallenge study. While the EMT6 tumors were rejected, CT26 tumors grew, suggesting that the memory response against EMT6 tumors likely mediated through mBKM0186 treatment has been established.

[0317] FIG. 117 shows immune profiling of T cells in blood and tumor tissue on day 14 post dosing of mBKM0186.

[0318] FIG. 118 shows tumor growth curves of EMT6 tumors after weekly (QW) treatment of mice bearing 150 mm³ tumors with 1 mg/kg of mBKM0186 with and without depletion of Vβ-specific T cells. Filled Triangles indicate dosing intervals of the depleting antibodies and open Triangles indicate dosing intervals of mBKM0186.

[0319] FIG. 119A and FIG. 119B show Pharmacokinetic profiles of BKM0186 (FIG. 119A) and BKM0281 (FIG. 119B) administered single dose IV in cynomolgus monkeys.

[0320] FIG. 120A shows T cell expansion following a single IV dose of BKM0186. FIG. 120B shows T cell expansion following a single IV dose BKM0281. n=3 Monkeys, n=1 monkey vehicle control.

[0321] FIG. 121 shows serum soluble CD25 levels in monkeys administered a single IV dose of BKM0186. Mean values, n=2-3 monkeys per group.

[0322] FIG. 122A shows serum IL-6 levels in monkeys administered a single IV dose of BKM0186.

[0323] FIG. 122B shows serum IL-6 levels in monkeys administered a single IV dose of BKM0281. Mean values, n=2-3 monkeys per group.

[0324] FIG. 123A shows serum IFN-γ levels in monkeys administered a single IV dose of BKM0186.

[0325] FIG. 123B shows IFN-γ levels in monkeys administered a single IV dose of BKM0281. Mean values, n=2-3 monkeys per group. Mean values, n=2-3 monkeys per group.

[0326] FIG. 124 shows in vitro concentration-effect relationships for bispecific-mediated in vitro expansion of Vβ6 T cells.

### DETAILED DESCRIPTION

### Definition

[0327] Certain specific details of this description are set forth in order to provide a thorough understanding of various embodiments. However, one skilled in the art will understand that the present disclosure may be practiced without these details. In other instances, well-known structures have not been shown or described in detail to avoid unnecessarily obscuring descriptions of the embodiments.

[0328] Unless the context requires otherwise, throughout the specification and claims which follow, the word “comprise” and variations thereof, such as, “comprises” and “comprising” are to be construed in an open, inclusive sense, that is, as “including, but not limited to.” Further, headings provided herein are for convenience only and do not interpret the scope or meaning of the claimed disclosure.

[0329] As used in this specification and the appended claims, the singular forms “a,” “an,” and “the” include plural referents unless the content clearly dictates otherwise. The use of the words “a” or “an” when used in conjunction with the term “comprising” herein may mean “one,” but it is also consistent with the meaning of “one or more,” “at least one,” and “one or more than one.”

[0330] It should also be noted that the term “or” is generally employed in its sense including “and/or” unless the content clearly dictates otherwise.

[0331] Unless otherwise defined, all technical and scientific terms used herein have the same meaning as commonly understood by one of ordinary skill in the art to which this disclosure belongs. Although methods and materials similar or equivalent to those described herein can be used in the practice or testing of the present disclosure, suitable methods and materials are described below.

[0332] The term “about” when referring to a measurable value such as an amount, a temporal duration, and the like, is meant to encompass variations of ±20% or in some instances ±10%, or in some instances ±5%, or in some instances ±1%, or in some instances ±0.1% from the specified value, as such variations are appropriate to perform the disclosed methods. As used herein, “about” and “approximately” generally mean an acceptable degree of error for the quantity measured given the nature or precision of the measurements. Exemplary degrees of error are within 20 percent (%), typically, within 10%, and more typically, within 5% of a given range of values.

[0333] The term “acquire” or “acquiring” as the terms are used herein, refer to obtaining possession of a physical entity (e.g., a sample, a polypeptide, a nucleic acid, or a sequence), or a value, e.g., a numerical value, by “directly acquiring” or “indirectly acquiring” the physical entity or value. “Directly acquiring” means performing a process (e.g., performing a synthetic or analytical method) to obtain the physical entity or value. “Indirectly acquiring” refers to receiving the physical entity or value from another party or source (e.g., a third party laboratory that directly acquired the physical entity or value). Directly acquiring a physical entity includes performing a process that includes a physical change in a physical substance, e.g., a starting material. Directly acquiring a value includes performing a process that includes a physical change in a sample or another substance, e.g., performing an analytical process which includes a physical change in a substance, e.g., a sample.

[0334] “Antibody molecule” as used herein refers to a protein, e.g., an immunoglobulin chain or fragment thereof, comprising at least one immunoglobulin variable domain structure and/or sequence. An antibody molecule encompasses antibodies (e.g., full-length antibodies) and antibody fragments. In some embodiments, an antibody molecule comprises an antigen binding or functional fragment of a full length antibody, or a full length immunoglobulin chain. For example, a full-length antibody is an immunoglobulin (Ig) molecule (e.g., an IgG antibody) that is naturally occurring or formed by normal immunoglobulin gene fragment recombinatorial processes). In embodiments, an antibody molecule refers to an immunologically active, antigen-binding portion of an immunoglobulin molecule, such as an antibody fragment. An antibody fragment, e.g., functional fragment, is a portion of an antibody, e.g., Fab, Fab′, F(ab′)₂, F(ab)₂, variable fragment (Fv), domain antibody (dAb), or single chain variable fragment (scFv). A functional antibody fragment binds to the same antigen as that recognized by the intact (e.g., full-length) antibody. The terms “antibody fragment” or “functional fragment” also include isolated fragments consisting of the variable regions, such as the “Fv” fragments consisting of the variable regions of the heavy and light chains or recombinant single chain polypeptide molecules in which light and heavy variable regions are connected by a peptide linker (“scFv proteins”). In some embodiments, an antibody fragment does not include portions of antibodies without antigen binding activity, such as Fc fragments or single amino acid residues. Exemplary antibody molecules include full length antibodies and antibody fragments, e.g., dAb (domain antibody), single chain, Fab, Fab′, and F(ab′)₂fragments, and single chain variable fragments (scFvs). In some embodiments, the antibody molecule is an antibody mimetic. In some embodiments, the antibody molecule is, or comprises, an antibody-like framework or scaffold, such as, fibronectins, ankyrin repeats (e.g., designed ankyrin repeat proteins (DARPins)), avimers, affibody affinity ligands, anticalins, or affilin molecules.

[0335] The term “human-like antibody molecule” as used herein refers to a humanized antibody molecule, human antibody molecule or an antibody molecule having at least 95% sequence identity with a non-murine germline framework region, e.g., FR1, FR2, FR3 and/or FR4. In some embodiments, the human-like antibody molecule comprises a framework region having at least 95% sequence identity to a human germline framework region, e.g., a FR1, FR2, FR3 and/or FR4 of a human germline framework region. In some embodiments, the human-like antibody molecule is a recombinant antibody. In some embodiments, the human-like antibody molecule is a humanized antibody molecule. In some embodiments, the human-like antibody molecule is human antibody molecule. In some embodiments, the human-like antibody molecule is a phage display or a yeast display antibody molecule. In some embodiments, the human-like antibody molecule is a chimeric antibody molecule. In some embodiments, the human-like antibody molecule is a CDR grafted antibody molecule.

[0336] As used herein, an “immunoglobulin variable domain sequence” refers to an amino acid sequence which can form the structure of an immunoglobulin variable domain. For example, the sequence may include all or part of the amino acid sequence of a naturally-occurring variable domain. For example, the sequence may or may not include one, two, or more N- or C-terminal amino acids, or may include other alterations that are compatible with formation of the protein structure.

[0337] In embodiments, an antibody molecule is monospecific, e.g., it comprises binding specificity for a single epitope. In some embodiments, an antibody molecule is multispecific, e.g., it comprises a plurality of immunoglobulin variable domain sequences, where a first immunoglobulin variable domain sequence has binding specificity for a first epitope and a second immunoglobulin variable domain sequence has binding specificity for a second epitope. In some embodiments, an antibody molecule is a bispecific antibody molecule. “Bispecific antibody molecule” as used herein refers to an antibody molecule that has specificity for more than one (e.g., two, three, four, or more) epitope and/or antigen.

[0338] “Antigen” (Ag) as used herein refers to a molecule that can provoke an immune response, e.g., involving activation of certain immune cells and/or antibody generation. Any macromolecule, including almost all proteins or peptides, can be an antigen. Antigens can also be derived from genomic recombinant or DNA. For example, any DNA comprising a nucleotide sequence or a partial nucleotide sequence that encodes a protein capable of eliciting an immune response encodes an “antigen.” In embodiments, an antigen does not need to be encoded solely by a full length nucleotide sequence of a gene, nor does an antigen need to be encoded by a gene at all. In embodiments, an antigen can be synthesized or can be derived from a biological sample, e.g., a tissue sample, a tumor sample, a cell, or a fluid with other biological components. As used, herein a “tumor antigen” or interchangeably, a “cancer antigen” includes any molecule present on, or associated with, a cancer, e.g., a cancer cell or a tumor microenvironment that can provoke an immune response. As used, herein an “immune cell antigen” includes any molecule present on, or associated with, an immune cell that can provoke an immune response.

[0339] The “antigen-binding site,” or “binding portion” of an antibody molecule refers to the part of an antibody molecule, e.g., an immunoglobulin (Ig) molecule, that participates in antigen binding. In embodiments, the antigen binding site is formed by amino acid residues of the variable (V) regions of the heavy (H) and light (L) chains. Three highly divergent stretches within the variable regions of the heavy and light chains, referred to as hypervariable regions, are disposed between more conserved flanking stretches called “framework regions,” (FRs). FRs are amino acid sequences that are naturally found between, and adjacent to, hypervariable regions in immunoglobulins. In embodiments, in an antibody molecule, the three hypervariable regions of a light chain and the three hypervariable regions of a heavy chain are disposed relative to each other in three dimensional space to form an antigen-binding surface, which is complementary to the three-dimensional surface of a bound antigen. The three hypervariable regions of each of the heavy and light chains are referred to as “complementarity-determining regions,” or “CDRs.” The framework region and CDRs have been defined and described, e.g., in Kabat, E. A., et al. (1991) Sequences of Proteins of Immunological Interest, Fifth Edition, U.S. Department of Health and Human Services, NIH Publication No. 91-3242, and Chothia, C. et al. (1987) J. Mol. Biol. 196:901-917. Each variable chain (e.g., variable heavy chain and variable light chain) is typically made up of three CDRs and four FRs, arranged from amino-terminus to carboxy-terminus in the amino acid order: FR1, CDR1, FR2, CDR2, FR3, CDR3, and FR4.

[0340] As used herein, an “immune cell” refers to any of various cells that function in the immune system, e.g., to protect against agents of infection and foreign matter. In embodiments, this term includes leukocytes, e.g., neutrophils, eosinophils, basophils, lymphocytes, and monocytes. Innate leukocytes include phagocytes (e.g., macrophages, neutrophils, and dendritic cells), mast cells, eosinophils, basophils, and natural killer cells. Innate leukocytes identify and eliminate pathogens, either by attacking larger pathogens through contact or by engulfing and then killing microorganisms, and are mediators in the activation of an adaptive immune response. The cells of the adaptive immune system are special types of leukocytes, called lymphocytes. B cells and T cells are important types of lymphocytes and are derived from hematopoietic stem cells in the bone marrow. B cells are involved in the humoral immune response, whereas T cells are involved in cell-mediated immune response. The term “immune cell” includes immune effector cells.

[0341] “Immune effector cell,” as that term is used herein, refers to a cell that is involved in an immune response, e.g., in the promotion of an immune effector response. Examples of immune effector cells include, but are not limited to, T cells, e.g., alpha/beta T cells and gamma/delta T cells, B cells, natural killer (NK) cells, natural killer T (NK T) cells, and mast cells.

[0342] The term “effector function” or “effector response” refers to a specialized function of a cell. Effector function of a T cell, for example, may be cytolytic activity or helper activity including the secretion of cytokines.

[0343] The terms “polypeptide”, “peptide” and “protein” (if single chain) are used interchangeably herein to refer to polymers of amino acids of any length. The polymer may be linear or branched, it may comprise modified amino acids, and it may be interrupted by non-amino acids. The terms also encompass an amino acid polymer that has been modified; for example, disulfide bond formation, glycosylation, lipidation, acetylation, phosphorylation, or any other manipulation, such as conjugation with a labeling component. The polypeptide can be isolated from natural sources, can be a produced by recombinant techniques from a eukaryotic or prokaryotic host, or can be a product of synthetic procedures.

[0344] The terms “nucleic acid,” “nucleic acid sequence,” “nucleotide sequence,” or “polynucleotide sequence,” and “polynucleotide” are used interchangeably. They refer to a polymeric form of nucleotides of any length, either deoxyribonucleotides or ribonucleotides, or analogs thereof. The polynucleotide may be either single-stranded or double-stranded, and if single-stranded may be the coding strand or non-coding (antisense) strand. A polynucleotide may comprise modified nucleotides, such as methylated nucleotides and nucleotide analogs. The sequence of nucleotides may be interrupted by non-nucleotide components. A polynucleotide may be further modified after polymerization, such as by conjugation with a labeling component. The nucleic acid may be a recombinant polynucleotide, or a polynucleotide of genomic, cDNA, semisynthetic, or synthetic origin which either does not occur in nature or is linked to another polynucleotide in a non-natural arrangement.

[0345] The term “isolated,” as used herein, refers to material that is removed from its original or native environment (e.g., the natural environment if it is naturally occurring). For example, a naturally-occurring polynucleotide or polypeptide present in a living animal is not isolated, but the same polynucleotide or polypeptide, separated by human intervention from some or all of the co-existing materials in the natural system, is isolated. Such polynucleotides could be part of a vector and/or such polynucleotides or polypeptides could be part of a composition, and still be isolated in that such vector or composition is not part of the environment in which it is found in nature. An isolated polynucleotide (ribonucleic acid (RNA), deoxyribonucleic acid (DNA)), or polypeptide is free of the genes/nucleic acids or sequences/amino acids that flank it in its naturally-occurring state.

[0346] The compositions and methods of the present invention encompass polypeptides and nucleic acids having the sequences specified, or sequences substantially identical or similar thereto, e.g., sequences at least 80%, 85%, 90%, 95% identical or higher to the sequence specified. In the context of an amino acid sequence, the term “substantially identical” is used herein to refer to a first amino acid that contains a sufficient or minimum number of amino acid residues that are i) identical to, or ii) conservative substitutions of aligned amino acid residues in a second amino acid sequence such that the first and second amino acid sequences can have a common structural domain and/or common functional activity. For example, amino acid sequences that contain a common structural domain having at least about 80%, 85%, 90%, 91%, 92%, 93%, 94%, 95%, 96%, 97%, 98% 99%, 99.5%, 99.9%, or 100% sequence identity to a reference sequence, e.g., a sequence provided herein. In the context of nucleotide sequence, the term “substantially identical” is used herein to refer to a first nucleic acid sequence that contains a sufficient or minimum number of nucleotides that are identical to aligned nucleotides in a second nucleic acid sequence such that the first and second nucleotide sequences encode a polypeptide having common functional activity, or encode a common structural polypeptide domain or a common functional polypeptide activity. For example, nucleotide sequences having at least about 80%, 85%, 90%, 91%, 92%, 93%, 94%, 95%, 96%, 97%, 98% 99%, 99.5%, 99.9%, or 100% sequence identity to a reference sequence, e.g., a sequence provided herein.

[0347] The term “variant” refers to a polypeptide that has a substantially identical amino acid sequence to a reference amino acid sequence, or is encoded by a substantially identical nucleotide sequence. In some embodiments, the variant is a functional variant. In some embodiments, a TCRβV variant can bind to TCRα and form a TCR α:β complex.

[0348] The term “functional variant” refers to a polypeptide that has a substantially identical amino acid sequence to a reference amino acid sequence, or is encoded by a substantially identical nucleotide sequence, and is capable of having one or more activities of the reference amino acid sequence.

[0349] Calculations of homology or sequence identity between sequences (the terms are used interchangeably herein) are performed as follows. To determine the percent identity of two amino acid sequences, or of two nucleic acid sequences, the sequences are aligned for optimal comparison purposes (e.g., gaps can be introduced in one or both of a first and a second amino acid or nucleic acid sequence for optimal alignment and non-homologous sequences can be disregarded for comparison purposes). In a preferred embodiment, the length of a reference sequence aligned for comparison purposes is at least 30%, preferably at least 40%, more preferably at least 50%, 60%, and even more preferably at least 70%, 80%, 90%, 100% of the length of the reference sequence. The amino acid residues or nucleotides at corresponding amino acid positions or nucleotide positions are then compared. When a position in the first sequence is occupied by the same amino acid residue or nucleotide as the corresponding position in the second sequence, then the molecules are identical at that position (as used herein amino acid or nucleic acid “identity” is equivalent to amino acid or nucleic acid “homology”).

[0350] The percent identity between the two sequences is a function of the number of identical positions shared by the sequences, taking into account the number of gaps, and the length of each gap, which need to be introduced for optimal alignment of the two sequences. The comparison of sequences and determination of percent identity between two sequences can be accomplished using a mathematical algorithm. In a preferred embodiment, the percent identity between two amino acid sequences is determined using the Needleman and Wunsch ((1970) J. Mol. Biol. 48:444-453) algorithm which has been incorporated into the GAP program in the GCG software package (available at http://www.geg.com), using either a Blossum 62 matrix or a PAM250 matrix, and a gap weight of 16, 14, 12, 10, 8, 6, or 4 and a length weight of 1, 2, 3, 4, 5, or 6. In yet another preferred embodiment, the percent identity between two nucleotide sequences is determined using the GAP program in the GCG software package (available at http://www.geg.com), using a NWSgapdna.CMP matrix and a gap weight of 40, 50, 60, 70, or 80 and a length weight of 1, 2, 3, 4, 5, or 6. A particularly preferred set of parameters (and the one that should be used unless otherwise specified) are a Blossum 62 scoring matrix with a gap penalty of 12, a gap extend penalty of 4, and a frameshift gap penalty of 5.

[0351] The percent identity between two amino acid or nucleotide sequences can be determined using the algorithm of E. Meyers and W. Miller ((1989) CABIOS, 4:11-17) which has been incorporated into the ALIGN program (version 2.0), using a PAM120 weight residue table, a gap length penalty of 12 and a gap penalty of 4. The nucleic acid and protein sequences described herein can be used as a “query sequence” to perform a search against public databases to, for example, identify other family members or related sequences. Such searches can be performed using the NBLAST and XBLAST programs (version 2.0) of Altschul, et al. (1990) J. Mol. Biol. 215:403-10. BLAST nucleotide searches can be performed with the NBLAST program, score=100, wordlength=12 to obtain nucleotide sequences homologous to a nucleic acid molecule of the invention. BLAST protein searches can be performed with the XBLAST program, score=50, wordlength=3 to obtain amino acid sequences homologous to protein molecules of the invention. To obtain gapped alignments for comparison purposes, Gapped BLAST can be utilized as described in Altschul et al., (1997) Nucleic Acids Res. 25:3389-3402. When utilizing BLAST and Gapped BLAST programs, the default parameters of the respective programs (e.g., XBLAST and NBLAST) can be used.

[0352] It is understood that the molecules of the present invention may have additional conservative or non-essential amino acid substitutions, which do not have a substantial effect on their functions.

[0353] The term “amino acid” is intended to embrace all molecules, whether natural or synthetic, which include both an amino functionality and an acid functionality and capable of being included in a polymer of naturally-occurring amino acids. Exemplary amino acids include naturally-occurring amino acids; analogs, derivatives and congeners thereof; amino acid analogs having variant side chains; and all stereoisomers of any of any of the foregoing. As used herein the term “amino acid” includes both the D- or L-optical isomers and peptidomimetics.

[0354] A “conservative amino acid substitution” is one in which the amino acid residue is replaced with an amino acid residue having a similar side chain. Families of amino acid residues having similar side chains have been defined in the art. These families include amino acids with basic side chains (e.g., lysine, arginine, histidine), acidic side chains (e.g., aspartic acid, glutamic acid), uncharged polar side chains (e.g., glycine, asparagine, glutamine, serine, threonine, tyrosine, cysteine), nonpolar side chains (e.g., alanine, valine, leucine, isoleucine, proline, phenylalanine, methionine, tryptophan), beta-branched side chains (e.g., threonine, valine, isoleucine) and aromatic side chains (e.g., tyrosine, phenylalanine, tryptophan, histidine).

[0355] As used herein, the term “molecule” as used in, e.g., antibody molecule, cytokine molecule, receptor molecule, includes full-length, naturally-occurring molecules, as well as variants, e.g., functional variants (e.g., truncations, fragments, mutated (e.g., substantially similar sequences) or derivatized form thereof), so long as at least one function and/or activity of the unmodified (e.g., naturally-occurring) molecule remains.

[0356] As used herein, the term “mutation” refers to an alteration in the nucleotide sequence of the genome of an organism, virus, or extrachromosomal DNA. In some embodiments, the mutation may be a large-scale mutation, such as amplifications (or gene duplications) or repetitions of a chromosomal segment, deletions of large chromosomal regions, chromosomal rearrangements (e.g., chromosomal translocations, chromosomal inversions, non-homologous chromosomal crossover, and interstitial deletions), and loss of heterozygosity. In some embodiments, the mutation may be a small-scale mutation, such as insertions, deletions, and substitution mutations. As used herein, the term “substitution mutation” refers to the transition that exchange a single nucleotide for another.

[0357] “Interleukin-2” also known as IL2, IL-2, IL 2, TCGF, lymphokine, and interleukin 2, as referred to herein, includes any of the recombinant or naturally-occurring forms of IL-2 or variants or homologs thereof that have or maintain IL-2 activity (e.g., at least 40% 50%, 60%, 70%, 80%, 90%, 95%, 96%, 97%, 98%, 99% or 100% activity). In some aspects, the variants or homologs have at least 40%, 45%, 50%, 55%, 60%, 65%, 70%, 75%, 80%, 85%, 90%, 95%, 96%, 97%, 98%, 99% or 100% amino acid sequence identity across the whole sequence or a portion of the sequence (e.g., a 50, 100, 150 or 200 continuous amino acid portion) compared to a naturally occurring IL-2. In some embodiments, IL-2 is substantially identical to the protein identified by the UniProt reference number P60568 or a variant or homolog having substantial identity thereto.

### Anti-TCRβV Antibodies

### Human T Cell Receptor (TCR) Complex

[0358] TCR is a disulfide-linked membrane-anchored heterodimeric protein normally consisting of the highly variable alpha (a) and beta (3) chains expressed as part of a complex with the invariant CD3 chain molecules. TCR on αβ T cells is formed by a heterodimer of one alpha chain and one beta chain. Each alpha or beta chain consists of a constant domain and a highly variable domain classified as the Immunoglobulin superfamily (IgSF) fold. The TCRβV chains can be further classified into 30 subfamilies (TRBV1-30). Despite their high structural and functional homology, the amino acid sequence homology in the TRBV genes is very low. Only 4 amino acids out of approximately 95 are identical while 10 additional amino acids are conserved among all subfamilies (see, an alignment of TCRBV amino acid sequences in Table 9). Nevertheless, TCRs formed between alpha and beta chains of highly diverse sequences show a remarkable structural homology (FIGS. 25A and 25B) and elicit a similar function, e.g., activation of T cells.

[0359] T cell receptors (TCR) can be found on the surface of T cells. TCRs recognize antigens, e.g., peptides, presented on, e.g., bound to, major histocompatibility complex (MHC) molecules on the surface of cells, e.g., antigen-presenting cells. TCRs are heterodimeric molecules and can comprise an alpha chain, a beta chain, a gamma chain or a delta chain. TCRs comprising an alpha chain and a beta chain are also referred to as TCRαβ. The TCR beta chain consists of the following regions (also known as segments): variable (V), diversity (D), joining (J) and constant (C) (see Mayer G. and Nyland J. (2010) Chapter 10: Major Histocompatibility Complex and T-cell Receptors-Role in Immune Responses. In: Microbiology and Immunology on-line, University of South Carolina School of Medicine). The TCR alpha chain consists of V, J and C regions. The rearrangement of the T-cell receptor (TCR) through somatic recombination of V (variable), D (diversity), J (joining), and C (constant) regions is a defining event in the development and maturation of a T cell. TCR gene rearrangement takes place in the thymus.

[0360] TCRs can comprise a receptor complex, known as the TCR complex, which comprises a TCR heterodimer comprising of an alpha chain and a beta chain, and dimeric signaling molecules, e.g., CD3 co-receptors, e.g., CD3δ/ε, and/or CD3γ/ε.

[0361] As used herein, the term “T cell receptor beta variable chain” or “TCRβV,” refers to an extracellular region of the T cell receptor beta chain which comprises the antigen recognition domain of the T cell receptor. The term TCRβV includes isoforms, mammalian, e.g., human TCRβV, species homologs of human and analogs comprising at least one common epitope with TCRβV. Human TCRβV comprises a gene family comprising subfamilies including, but not limited to: a TCRβ V6 subfamily, a TCRβ V10 subfamily, a TCRβ V12 subfamily, a TCRβ V5 subfamily, a TCRβ V7 subfamily, a TCRβ V11 subfamily, a TCRβ V14 subfamily, a TCRβ V16 subfamily, a TCRβ V18 subfamily, a TCRβ V9 subfamily, a TCRβ V13 subfamily, a TCRβ V4 subfamily, a TCRβ V3 subfamily, a TCRβ V2 subfamily, a TCRβ V15 subfamily, a TCRβ V30 subfamily, a TCRβ V19 subfamily, a TCRβ V27 subfamily, a TCRβ V28 subfamily, a TCRβ V24 subfamily, a TCRβ V20 subfamily, TCRβ V25 subfamily, a TCRβ V29 subfamily, a TCRβ V1 subfamily, a TCRβ V17 subfamily, a TCRβ V21 subfamily, a TCRβ V23 subfamily, or a TCRβ V26 subfamily, as well as family members of said subfamilies, and variants thereof (e.g., a structural or functional variant thereof). In some embodiments, the TCRβ V6 subfamily comprises: TCRβ V6-4*01, TCRβ V6-4*02, TCRβ V6-9*01, TCRβ V6-8*01, TCRβ V6-5*01, TCRβ V6-6*02, TCRβ V6-6*01, TCRβ V6-2*01, TCRβ V6-3*01 or TCRβ V6-1*01. In some embodiments, TCRβV comprises TCRβ V6-5*01, or a variant thereof, e.g., a variant having 85%, 90%, 95%, 99% or more identity the naturally-occurring sequence. TCRβ V6-5*01 is also known as TRBV65; TCRBV6S5; TCRBV13S1, or TCRβ V13.1. The amino acid sequence of TCRβ V6-5*01, e.g., human TCRβ V6-5*01, is known in that art, e.g., as provided by IMGT ID L36092. In some embodiments, TCRβ V6-5*01 is encoded by the nucleic acid sequence of SEQ ID NO: 43, or a sequence having 85%, 90%, 95%, 99% or more identity thereof. In some embodiments, TCRβ V6-5*01 comprises the amino acid sequence of SEQ ID NO: 44, or a sequence having 85%, 90%, 95%, 99% or more identity thereof.

SEQ ID NO: 43
ATGAGCATCGGCCTCCTGTGCTGTGCAGCCTTGTCTCTCCTGTGGGCAG
GTCCAGTGAATGCTGGTGTCACTCAGACCCCAAAATTCCAGGTCCTGAA
GACAGGACAGAGCATGACACTGCAGTGTGCCCAGGATATGAACCATGAA
TACATGTCCTGGTATCGACAAGACCCAGGCATGGGGCTGAGGCTGATTC
ATTACTCAGTTGGTGCTGGTATCACTGACCAAGGAGAAGTCCCCAATGG
CTACAATGTCTCCAGATCAACCACAGAGGATTTCCCGCTCAGGCTGCTG
TCGGCTGCTCCCTCCCAGACATCTGTGTACTTCTGTGCCAGCAGTTACT
C
SEQ ID NO: 44
MSIGLLCCAALSLLWAGPVNAGVTQTPKFQVLKTGQSMTLQCAQDMNHE
YMSWYRQDPGMGLRLIHY-SVGAGITDQGEVPNGYNVSRSTTEDFPLRL
LSAAPSQTSVYFCASSY

### TCR Beta V (TCRβV)

[0362] Diversity in the immune system enables protection against a huge array of pathogens. Since the germline genome is limited in size, diversity is achieved not only by the process of V(D)J recombination but also by junctional (junctions between V-D and D-J segments) deletion of nucleotides and addition of pseudo-random, non-templated nucleotides. The TCR beta gene undergoes gene arrangement to generate diversity.

[0363] The TCR V beta repertoire varies between individuals and populations because of, e.g., 7 frequently occurring inactivating polymorphisms in functional gene segments and a large insertion/deletion-related polymorphism encompassing 2 V beta gene segments.

[0364] Provided herein are, inter alia, antibody molecules and fragments thereof, that bind, e.g., specifically bind, to a human TCR beta V chain (TCRβV), e.g., a TCRβV gene family (also referred to as a group), e.g., a TCRβV subfamily (also referred to as a subgroup), e.g., as described herein. TCR beta V families and subfamilies are known in the art, e.g., as described in Yassai et al., (2009) Immunogenetics 61(7) pp: 493-502; Wei S. and Concannon P. (1994) Human Immunology 41(3) pp: 201-206. The antibodies described herein can be recombinant antibodies, e.g., recombinant non-murine antibodies, e.g., recombinant human or humanized antibodies.

[0365] The terms TCRBV, TCRVB, TRBV, TCRβV, TCRVβ or TRβV are used interchangeably herein and refer to a TCR beta V chain, e.g., as described herein.

[0366] In some embodiments, provided herein is an anti-TCRβV antibody molecule that binds to human TCRβV, e.g., a TCRβV family, e.g., gene family or a variant thereof. In some embodiments a TCRBV gene family comprises one or more subfamilies, e.g., as described herein, e.g., in FIG. 4, Table 8A or Table 8B. In some embodiments, the TCRβV gene family comprises: a TCRβ V6 subfamily, a TCRβ V10 subfamily, a TCRβ V12 subfamily, a TCRβ V5 subfamily, a TCRβ V7 subfamily, a TCRβ V11 subfamily, a TCRβ V14 subfamily, a TCRβ V16 subfamily, a TCRβ V18 subfamily, a TCRβ V9 subfamily, a TCRβ V13 subfamily, a TCRβ V4 subfamily, a TCRβ V3 subfamily, a TCRβ V2 subfamily, a TCRβ V15 subfamily, a TCRβ V30 subfamily, a TCRβ V19 subfamily, a TCRβ V27 subfamily, a TCRβ V28 subfamily, a TCRβ V24 subfamily, a TCRβ V20 subfamily, TCRβ V25 subfamily, a TCRβ V29 subfamily, a TCRβ V1 subfamily, a TCRβ V17 subfamily, a TCRβ V21 subfamily, a TCRβ V23 subfamily, or a TCRβ V26 subfamily.

[0367] In some embodiments, TCRβ V6 subfamily is also known as TCRβ V13.1. In some embodiments, the TCRβ V6 subfamily comprises: TCRβ V6-4*01, TCRβ V6-4*02, TCRβ V6-9*01, TCRβ V6-8*01, TCRβ V6-5*01, TCRβ V6-6*02, TCRβ V6-6*01, TCRβ V6-2*01, TCRβ V6-3*01 or TCRβ V6-1*01, or a variant thereof. In some embodiments, TCRβ V6 comprises TCRβ V6-4*01, or a variant thereof. In some embodiments, TCRβ V6 comprises TCRβ V6-4*02, or a variant thereof. In some embodiments, TCRβ V6 comprises TCRβ V6-9*01, or a variant thereof. In some embodiments, TCRβ V6 comprises TCRβ V6-8*01, or a variant thereof. In some embodiments, TCRβ V6 comprises TCRβ V6-5*01, or a variant thereof. In some embodiments, TCRβ V6 comprises TCRβ V6-6*02, or a variant thereof. In some embodiments, TCRβ V6 comprises TCRβ V6-6*01, or a variant thereof. In some embodiments, TCRβ V6 comprises TCRβ V6-2*01, or a variant thereof. In some embodiments, TCRβ V6 comprises TCRβ V6-3*01, or a variant thereof. In some embodiments, TCRβ V6 comprises TCRβ V6-1*01, or a variant thereof.

[0368] In some embodiments, TCRβ V6 comprises TCRβ V6-5*01, or a variant thereof. In some embodiments, TCRβ V6, e.g., TCRβ V6-5*01, is recognized, e.g., bound, by SEQ ID NO: 1 and/or SEQ ID NO: 2. In some embodiments, TCRβ V6, e.g., TCRβ V6-5*01, is recognized, e.g., bound, by SEQ ID NO: 9 and/or SEQ ID NO: 10. In some embodiments, TCRβ V6 is recognized, e.g., bound, by SEQ ID NO: 9 and/or SEQ ID NO: 11.

[0369] In some embodiments, TCRβ V10 subfamily is also known as TCRβ V12. In some embodiments, the TCRβ V10 subfamily comprises: TCRβ V10-1*01, TCRβ V10-1*02, TCRβ V10-3*01 or TCRβ V10-2*01, or a variant thereof.

[0370] In some embodiments, TCRβ V12 subfamily is also known as TCRβ V8.1. In some embodiments, the TCRβ V12 subfamily comprises: TCRβ V12-4*01, TCRβ V12-3*01, or TCRβ V12-5*01, or a variant thereof. In some embodiments, TCRβ V12 is recognized, e.g., bound, by SEQ ID NO: 15 and/or SEQ ID NO: 16. In some embodiments, TCRβ V12 is recognized, e.g., bound, by any one of SEQ ID NOs 23-25, and/or any one of SEQ ID NO: 26-30:

[0371] In some embodiments, the TCRβ V5 subfamily is chosen from: TCRβ V5-5*01, TCRβ V5-6*01, TCRβ V5-4*01, TCRβ V5-8*01, TCRβ V5-1*01, or a variant thereof.

[0372] In some embodiments, the TCRβ V7 subfamily comprises TCRβ V7-7*01, TCRβ V7-6*01, TCRβ V7-8*02, TCRβ V7-4*01, TCRβ V7-2*02, TCRβ V7-2*03, TCRβ V7-2*01, TCRβ V7-3*01, TCRβ V7-9*03, or TCRβ V7-9*01, or a variant thereof.

[0373] In some embodiments, the TCRβ V11 subfamily comprises: TCRβ V11-1*01, TCRβ V11-2*01 or TCRβ V11-3*01, or a variant thereof. In some embodiments, the TCRβ V14 subfamily comprises TCRβ V14*01, or a variant thereof. In some embodiments, the TCRβ V16 subfamily comprises TCRβ V16*01, or a variant thereof. In some embodiments, the TCRβ V18 subfamily comprises TCRβ V18*01, or a variant thereof. In some embodiments, the TCRβ V9 subfamily comprises TCRβ V9*01 or TCRβ V9*02, or a variant thereof. In some embodiments, the TCRβ V13 subfamily comprises TCRβ V13*01, or a variant thereof. In some embodiments, the TCRβ V4 subfamily comprises TCRβ V4-2*01, TCRβ V4-3*01, or TCRβ V4-1*01, or a variant thereof. In some embodiments, the TCRβ V3 subfamily comprises TCRβ V3-1*01, or a variant thereof. In some embodiments, the TCRβ V2 subfamily comprises TCRβ V2*01, or a variant thereof. In some embodiments, the TCRβ V15 subfamily comprises TCRβ V15*01, or a variant thereof. In some embodiments, the TCRβ V30 subfamily comprises TCRβ V30*01, or TCRβ V30*02, or a variant thereof. In some embodiments, the TCRβ V19 subfamily comprises TCRβ V19*01, or TCRβ V19*02, or a variant thereof. In some embodiments, the TCRβ V27 subfamily comprises TCRβ V27*01, or a variant thereof. In some embodiments, the TCRβ V28 subfamily comprises TCRβ V28*01, or a variant thereof. In some embodiments, the TCRβ V24 subfamily comprises TCRβ V24-1*01, or a variant thereof. In some embodiments, the TCRβ V20 subfamily comprises TCRβ V20-1*01, or TCRβ V20-1*02, or a variant thereof. In some embodiments, the TCRβ V25 subfamily comprises TCRβ V25-1*01, or a variant thereof. In some embodiments, the TCRβ V29 subfamily comprises TCRβ V29-1*01, or a variant thereof.

[0374] Exemplary amino acid sequences for TCRβV subfamily members can be found on the ImMunoGeneTics Information System website: http://www.imgt.org/, or in a similar resource.

### Anti-TCRβV Antibodies

[0375] Current bispecific constructs designed to redirect T cells to promote tumor cell lysis for cancer immunotherapy typically utilize antibody fragments (Fab, scFv, VH, single domain antibody, etc.) that are derived from monoclonal antibodies (mAb) directed against the CD3e subunit of the T cell receptor (TCR). However, there are limitations to this approach which may prevent the full realization of the therapeutic potential for such bispecific constructs. Previous studies have shown that even low “activating” doses of anti-CD3e mAb can cause long-term T cell dysfunction and exert immunosuppressive effects. In addition, anti-CD3e mAbs have been associated with side effects that result from massive T cell activation. The large number of activated T cells secrete substantial amounts of cytokines, the most important of which is Interferon gamma (IFNγ). This excess amount of IFNγ in turn activates macrophages which then overproduce proinflammatory cytokines such as IL-1beta, IL-6, IL-10 and TNF-alpha, causing a “cytokine storm” known as the cytokine release syndrome (CRS) (Shimabukuro-Vornhagen et al., J Immunother Cancer. 2018 Jun. 15; 6(1):56, herein incorporated by reference in its entirety). Thus, the need exists for developing antibodies that are capable of binding and activating only a subset of effector T cells, e.g., to re-duce the CRS and/or neurotoxicity (NT).

[0376] Described herein are molecules targeting the TCRβV chain of TCR and methods thereof. Without wishing to be bound by theory, such molecules are capable of binding, activating, and/or expanding only a subset of T cells, avoiding or reducing CRS and/or NT and minimizing potential immunosuppressive effects of anti-CD3 mAbs.

[0377] Described herein is a class of antibodies, i.e., anti-TCRβV antibody molecules as described herein, which despite having low sequence similarity (e.g., low sequence identity among the different antibody molecules that recognize different TCRβV subfamilies), recognize a structurally conserved, yet sequence-wise variable, region, e.g., domain, on the TCRβV protein (as denoted by the circled area in FIG. 25A) and have a similar function (e.g., activation of T cells and a similar cytokine profile as described herein). Thus, the anti-TCRβV antibody molecules as described herein share a structure-function relationship.

[0378] Without wishing to be bound by theory, in some embodiments, the anti-TCRβV antibody molecules as described herein bind to an outward facing epitope of a TCRβV protein when it is in a complex with a TCRalpha protein, e.g., as denoted by the circled area in FIG. 25A. In some embodiments, the anti-TCRβV antibody molecules as described herein recognize (e.g., bind to), a domain (e.g., an epitope) on the TCRβV protein that is: (1) structurally conserved among different TCRβV subfamilies; and (2) has minimal sequence identity among the different TCRβV subfamilies. As shown in Table 9, TCRβV proteins from the different TCRBV subfamilies share minimal sequence similarity. However, as shown in FIG. 25A-25B, TCRβV proteins which have minimal sequence similarity, share a similar 3D conformation and structure.

[0379] The alignment of TCRBV amino acid sequences in Table 9 underscores the diversity of TCR sequences. In particular, the TRBV sequences from different subfamilies are considerably different from each other.

[0380] In some embodiments, the anti-TCRβV antibody molecules as described herein do not recognize, e.g., bind to, an interface of a TCRβV:TCRalpha complex. In some embodiments, the anti-TCRβV antibody molecules as described herein do not recognize, e.g., bind to, a constant region of a TCRβV protein. An exemplary antibody that binds to a constant region of a TCRBV region is JOVI.1 as de-scribed in Viney et al., (Hybridoma. 1992 December; 11(6):701-13). In some embodiments, the anti-TCRβV antibody molecules as described herein do not recognize, e.g., bind to, one or more (e.g., all) of a complementarity determining region (e.g., CDR1, CDR2 and/or CDR3) of a TCRβV protein.

[0381] Provided herein are, inter alia, antibody molecules directed to the variable chain of the beta subunit of TCR (TCRβV) which bind and, e.g., activate a subset of T cells. The anti-TCRβV antibody molecules as described herein result in lesser or no production of cytokines associated with CRS, e.g., IL-6, IL-1beta, IL-10 and TNF alpha; and enhanced and/or delayed production of IL-2 and IFNγ. In some embodiments, the anti-TCRβV antibodies as described herein have a cytokine profile, e.g., as described herein, which differs from a cytokine profile of a T cell engager that binds to a receptor or molecule other than a TCRβV region (“a non-TCRβV-binding T cell engager”). In some embodiments, the non-TCRβV-binding T cell engager comprises an antibody that binds to a CD3 molecule (e.g., CD3 epsilon (CD3e) molecule); or a TCR alpha (TCRα) molecule. In some embodiments, the non-TCRβV-binding T cell engager is an OKT3 antibody or an SP34-2 antibody.

[0382] In some embodiments, the anti-TCRβV antibodies as described herein result in expansion of TCRβV+ T cells, e.g., a subset of memory effector T cells known as TEMRA. Without wishing to be bound by theory, it is believed that in some embodiments, TEMRA cells can promote tumor cell lysis but not CRS. Accordingly, provided herein are methods of making said anti-TCRβV antibody molecules and uses thereof. Also described herein are multispecific molecules, e.g., bispecific molecules comprising said anti-TCRβV antibody molecules. In some embodiments, compositions comprising anti-TCRβV antibody molecules of the present disclosure, can be used, e.g., to: (1) activate and redirect T cells to promote tumor cell lysis for cancer immuno-therapy; and/or (2) expand TCRβV+ T cells. In some embodiments, compositions comprising anti-TCRβV antibody molecules as described herein limit the harmful side-effects of CRS and/or NT, e.g., CRS and/or NT associated with anti-CD3e targeting.

[0383] In some embodiments, the anti-TCRβV antibody molecule binds to one or more of TRBV2, TRBV3-1, TRBV4-1, TRBV4-2, TRBV4-3, TRBV5-1, TRBV5-4, TRBV5-5, TRBV5-6, TRBV5-8, TRBV6-1, TRBV6-2, TRBV6-3, TRBV6-4, TRBV6-5, TRBV6-6, TRBV6-8, TRBV6-9, TRBV7-2, TRBV7-3, TRBV7-4, TRBV7-6, TRBV7-7, TRBV7-8, TRBV7-9, TRBV9, TRBV10-1, TRBV10-2, TRBV10-3, TRBV11-1, TRBV11-2, TRBV11-3, TRBV12-3, TRBV12-4, TRBV12-5, TRBV13, TRBV14, TRBV15, TRBV16, TRBV18, TRBV19, TRBV20-1, TRBV24-1, TRBV25-1, TRBV27, TRBV28, TRBV29-1 and TRBV30. In some embodiments, the anti-TCRβV antibody molecule binds to one or more of TRBV6-1, TRBV6-2, TRBV6-3, TRBV6-4, TRBV6-5, TRBV6-6, TRBV6-8 and TRBV6-9. In some embodiments, the anti-TCRβV antibody molecule is an anti-TRBV2, anti-TRBV3-1, anti-TRBV4-1, anti-TRBV4-2, anti-TRBV4-3, anti-TRBV5-1, anti-TRBV5-4, anti-TRBV5-5, anti-TRBV5-6, anti-TRBV5-8, anti-TRBV6-1, anti-TRBV6-2, anti-TRBV6-3, anti-TRBV6-4, anti-TRBV6-5, anti-TRBV6-6, anti-TRBV6-8, anti-TRBV6-9, anti-TRBV7-2, anti-TRBV7-3, anti-TRBV7-4, anti-TRBV7-6, anti-TRBV7-7, anti-TRBV7-8, anti-TRBV7-9, anti-TRBV9, anti-TRBV10-1, anti-TRBV10-2, anti-TRBV10-3, anti-TRBV11-1, anti-TRBV11-2, anti-TRBV11-3, anti-TRBV12-3, anti-TRBV12-4, anti-TRBV12-5, anti-TRBV13, anti-TRBV14, anti-TRBV15, anti-TRBV16, anti-TRBV18, anti-TRBV19, anti-TRBV20-1, anti-TRBV24-1, anti-TRBV25-1, anti-TRBV27, anti-TRBV28, anti-TRBV29-1, or anti-TRBV30. Exemplary anti-TCRβV antibody molecules and the corresponding TCRβV subfamilies recognized by said anti-TCRβV antibody molecules are disclosed in Table 10A.

[0384] In some embodiments, the anti-TCRβV antibody molecule binds specifically to TRBV2, TRBV3-1, TRBV4-1, TRBV4-2, TRBV4-3, TRBV5-1, TRBV5-4, TRBV5-5, TRBV5-6, TRBV5-8, TRBV6-1, TRBV6-2, TRBV6-3, TRBV6-4, TRBV6-5, TRBV6-6, TRBV6-8, TRBV6-9, TRBV7-2, TRBV7-3, TRBV7-4, TRBV7-6, TRBV7-7, TRBV7-8, TRBV7-9, TRBV9, TRBV10-1, TRBV10-2, TRBV10-3, TRBV11-1, TRBV11-2, TRBV11-3, TRBV12-3, TRBV12-4, TRBV12-5, TRBV13, TRBV14, TRBV15, TRBV16, TRBV18, TRBV19, TRBV20-1, TRBV24-1, TRBV25-1, TRBV27, TRBV28, TRBV29-1 or TRBV30. In some embodiments, the anti-TCRβV antibody molecule binds specifically to TRBV6-1. In some embodiments, the anti-TCRβV antibody molecule binds specifically to TRBV6-2. In some embodiments, the anti-TCRβV antibody molecule binds specifically to TRBV6-3. In some embodiments, the anti-TCRβV antibody molecule binds specifically to TRBV6-4. In some embodiments, the anti-TCRβV antibody molecule binds specifically to TRBV6-5. In some embodiments, the anti-TCRβV antibody molecule binds specifically to TRBV6-6. In some embodiments, the anti-TCRβV antibody molecule binds specifically to TRBV6-8. In some embodiments, the anti-TCRβV antibody molecule binds specifically to TRBV6-9.

[0385] In some embodiments, the anti-TCRβV antibody molecule does not bind to TCRβ V12, or binds to TCRβ V12 with an affinity and/or binding specificity that is less than (e.g., less than about 10%, 20%, 30%, 40%, 50%, 60%, 70%, 80%, 90% or about 2-, 5-, or 10-fold) the affinity and/or binding specificity of the 16G8 murine antibody or a humanized version thereof as de-scribed in U.S. Pat. No. 5,861,155.

[0386] In some embodiments, the anti-TCRβV antibody molecule binds to TCRβ V12 with an affinity and/or binding specificity that is greater than (e.g., greater than about 10%, 20%, 30%, 40%, 50%, 60%, 70%, 80%, 90% or about 2-, 5-, or 10-fold) the affinity and/or binding specificity of the 16G8 murine antibody or a humanized version thereof as described in U.S. Pat. No. 5,861,155.

[0387] In some embodiments, the anti-TCRβV antibody molecule binds to a TCRβV region other than TCRβ V12 (e.g., TCRβV region as described herein, e.g., TCRβ V6 subfamily (e.g., TCRβ V6-5*01) with an affinity and/or binding specificity that is greater than (e.g., greater than about 10%, 20%, 30%, 40%, 50%, 60%, 70%, 80%, 90% or about 2-, 5-, or 10-fold) the affinity and/or binding specificity of the 16G8 murine antibody or a humanized version thereof as de-scribed in U.S. Pat. No. 5,861,155.

[0388] In some embodiments, the anti-TCRβV antibody molecule does not comprise the CDRs of the Antibody B murine antibody.

[0389] In some embodiments, the anti-TCRβV antibody molecule does not bind to TCRβ V5-5*01 or TCRβ V5-1*01, or binds to TCRβ V5-5*01 or TCRβ V5-1*01 with an affinity and/or binding specificity that is less than (e.g., less than about 10%, 20%, 30%, 40%, 50%, 60%, 70%, 80%, 90% or about 2-, 5-, or 10-fold) the affinity and/or binding specificity of the TM23 murine antibody or a humanized version thereof as described in U.S. Pat. No. 5,861,155.

[0390] In some embodiments, the anti-TCRβV antibody molecule binds to TCRβ V5-5*01 or TCRβ V5-1*01 with an affinity and/or binding specificity that is greater than (e.g., greater than about 10%, 20%, 30%, 40%, 50%, 60%, 70%, 80%, 90% or about 2-, 5-, or 10-fold) the affinity and/or binding specificity of the TM23 murine antibody or a humanized version thereof as de-scribed in U.S. Pat. No. 5,861,155.

[0391] In some embodiments, the anti-TCRβV antibody molecule binds to a TCRβV region other than TCRβ V5-5*01 or TCRβ V5-1*01 (e.g., TCRβV region as described herein, e.g., TCRβ V6 subfamily (e.g., TCRβ V6-5*01) with an affinity and/or binding specificity that is greater than (e.g., greater than about 10%, 20%, 30%, 40%, 50%, 60%, 70%, 80%, 90% or about 2-, 5-, or 10-fold) the affinity and/or binding specificity of the TM23 murine antibody or a humanized version thereof as described in U.S. Pat. No. 5,861,155.

[0392] In some embodiments, the anti-TCRβV antibody molecule does not comprise the CDRs of the TM23 murine antibody.

[0393] In some embodiments, the light or the heavy chain variable framework (e.g., the region encompassing at least FR1, FR2, FR3, and optionally FR4) of the anti-TCRβV antibody molecule, e.g., anti-TCRβ V6 (e.g., anti-TCRβ V6-5*01) antibody molecule can be chosen from: (a) a light or heavy chain variable framework including at least 80%, 85%, 87% 90%, 92%, 93%, 95%, 97%, 98%, or 100% of the amino acid residues from a human light or heavy chain variable framework, e.g., a light or heavy chain variable framework residue from a human mature antibody, a human germline sequence, or a human consensus sequence; (b) a light or heavy chain variable framework including from 20% to 80%, 40% to 60%, 60% to 90%, or 70% to 95% of the amino acid residues from a human light or heavy chain variable framework, e.g., a light or heavy chain variable framework residue from a human mature antibody, a human germline sequence, or a human consensus sequence; (c) a non-human framework (e.g., a rodent framework); or (d) a non-human framework that has been modified, e.g., to remove antigenic or cytotoxic determinants, e.g., deimmunized, or partially humanized. In some embodiments, the light or heavy chain variable framework region (particularly FR1, FR2 and/or FR3) includes a light or heavy chain variable framework sequence at least 70, 75, 80, 85, 87, 88, 90, 92, 94, 95, 96, 97, 98, 99% identical or identical to the frameworks of a VL or VH segment of a human germline gene.

[0394] In some embodiments, the anti-TCRβV antibody molecule, e.g., anti-TCRβ V6 (e.g., anti-TCRβ V6-5*01) antibody molecule, comprises a heavy chain variable domain having at least one, two, three, four, five, six, seven, ten, fifteen, twenty or more changes, e.g., amino acid substitutions or deletions, from an amino acid sequence of any one of A-H.1 to A-H.85, e.g., A-H.1, A-H.2 or A-H.68, e.g., the amino acid sequence of the FR region in the entire variable region, e.g., shown in FIG. 2A, or in SEQ ID NO: 9.

[0395] Alternatively, or in combination with the heavy chain substitutions described herein, the anti-TCRβV antibody molecule, e.g., anti-TCRβ V6 (e.g., anti-TCRβ V6-5*01) antibody molecule, comprises a light chain variable domain having at least one, two, three, four, five, six, seven, ten, fifteen, twenty or more amino acid changes, e.g., amino acid substitutions or deletions, from an amino acid sequence of any one of A-H.1 to A-H.85, e.g., A-H.1, A-H.2 or A-H.68, e.g., the amino acid sequence of the FR region in the entire variable region, e.g., shown in FIG. 2B, or in SEQ ID NO: 10 or SEQ ID NO: 11.

[0396] In some embodiments, the anti-TCRβV antibody molecule, e.g., anti-TCRβ V6 (e.g., anti-TCRβ V6-5*01) antibody molecule, includes one, two, three, or four heavy chain framework regions shown in FIG. 2A, or a sequence substantially identical thereto.

[0397] In some embodiments, the anti-TCRβV antibody molecule, e.g., anti-TCRβ V6 (e.g., anti-TCRβ V6-5*01) antibody molecule, includes one, two, three, or four light chain framework regions shown in FIG. 2B, or a sequence substantially identical thereto.

[0398] In some embodiments, the anti-TCRβV antibody molecule, e.g., anti-TCRβ V6 (e.g., anti-TCRβ V6-5*01) antibody molecule, comprises the light chain framework region 1 of A-H.1 or A-H.2, e.g., as shown in FIG. 2B.

[0399] In some embodiments, the anti-TCRβV antibody molecule, e.g., anti-TCRβ V6 (e.g., anti-TCRβ V6-5*01) antibody molecule, comprises the light chain framework region 2 of A-H.1 or A-H.2, e.g., as shown in FIG. 2B.

[0400] In some embodiments, the anti-TCRβV antibody molecule, e.g., anti-TCRβ V6 (e.g., anti-TCRβ V6-5*01) antibody molecule, comprises the light chain framework region 3 of A-H.1 or A-H.2, e.g., as shown in FIG. 2B.

[0401] In some embodiments, the anti-TCRβV antibody molecule, e.g., anti-TCRβ V6 (e.g., anti-TCRβ V6-5*01) antibody molecule, comprises the light chain framework region 4 of A-H.1 or A-H.2, e.g., as shown in FIG. 2B.

[0402] In some embodiments, the anti-TCRβV antibody molecule, e.g., anti-TCRβ V6 (e.g., anti-TCRβ V6-5*01) antibody molecule, comprises a light chain variable domain comprising a framework region, e.g., framework region 1 (FR1), comprising a change, e.g., a substitution (e.g., a conservative substitution) at position 10 according to Kabat numbering. In some embodiments, the FR1 comprises a Phenylalanine at position 10, e.g., a Serine to Phenyalanine substitution. In some embodiments, the substitution is relative to a human germline light chain framework region sequence.

[0403] In some embodiments, the anti-TCRβV antibody molecule, e.g., anti-TCRβ V6 (e.g., anti-TCRβ V6-5*01) antibody molecule, comprises a light chain variable domain comprising a framework region, e.g., framework region 2 (FR2), comprising a change, e.g., a substitution (e.g., a conservative substitution) at a position as described herein according to Kabat numbering. In some embodiments, FR2 comprises a Histidine at position 36, e.g., a substitution at position 36 according to Kabat numbering, e.g., a Tyrosine to Histidine substitution. In some embodiments, FR2 comprises an Alanine at position 46, e.g., a substitution at position 46 according to Kabat numbering, e.g., an Arginine to Alanine substitution. In some embodiments, the substitution is relative to a human germline light chain framework region sequence.

[0404] In some embodiments, the anti-TCRβV antibody molecule, e.g., anti-TCRβ V6 (e.g., anti-TCRβ V6-5*01) antibody molecule, comprises a light chain variable domain comprising a framework region, e.g., framework region 3 (FR3), comprising a change, e.g., a substitution (e.g., a conservative substitution) at a position as described herein according to Kabat numbering. In some embodiments, FR3 comprises a Phenyalanine at position 87, e.g., a substitution at position 87 according to Kabat numbering, e.g., a Tyrosine to Phenyalanine substitution. In some embodiments, the substitution is relative to a human germline light chain framework region sequence.

[0405] In some embodiments, the anti-TCRβV antibody molecule, e.g., anti-TCRβ V6 (e.g., anti-TCRβ V6-5*01) antibody molecule, comprises a light chain variable domain comprising: (a) a framework region 1 (FR1) comprising a Phenylalanine at position 10, e.g., a substitution at position 10 according to Kabat numbering, e.g., a Serine to Phenyalanine substitution; (b) a framework region 2 (FR2) comprising a Histidine at position 36, e.g., a substitution at position 36 according to Kabat numbering, e.g., a Tyrosine to Histidine substitution, and a Alanine at position 46, e.g., a substitution at position 46 according to Kabat numbering, e.g., a Arginine to Alanine substitution; and (c) a framework region 3 (FR3) comprising a Phenylalanine at position 87, e.g., a substitution at position 87 according to Kabat numbering, e.g., a Tyrosine to Phenyalanine substitution, e.g., as shown in the amino acid sequence of SEQ ID NO: 10. In some embodiments, the substitution is relative to a human germline light chain framework region sequence.

[0406] In some embodiments, the anti-TCRβV antibody molecule, e.g., anti-TCRβ V6 (e.g., anti-TCRβ V6-5*01) antibody molecule, comprises a light chain variable domain comprising: (a) a framework region 2 (FR2) comprising a Histidine at position 36, e.g., a substitution at position 36 according to Kabat numbering, e.g., a Tyrosine to Histidine substitution, and a Alanine at position 46, e.g., a substitution at position 46 according to Kabat numbering, e.g., a Arginine to Alanine substitution; and (b) a framework region 3 (FR3) comprising a Phenylalanine at position 87, e.g., a substitution at position 87 according to Kabat numbering, e.g., a Tyrosine to Phenyalanine substitution, e.g., as shown in the amino acid sequence of SEQ ID NO: 11. In some embodiments, the substitution is relative to a human germline light chain framework region sequence.

[0407] In some embodiments, the anti-TCRβV antibody molecule, e.g., anti-TCRβ V6 (e.g., anti-TCRβ V6-5*01) antibody molecule, comprises a light chain variable domain comprising: (a) a framework region 1 (FR1) comprising a change, e.g., a substitution (e.g., a conservative substitution) at one or more (e.g., all) positions as described herein according to Kabat numbering, (b) a framework region 2 (FR2) comprising a change, e.g., a substitution (e.g., a conservative substitution) at one or more (e.g., all) position as described herein according to Kabat numbering and (c) a framework region 3 (FR3) comprising a change, e.g., a substitution (e.g., a conservative substitution) at one or more (e.g., all) position as described herein according to Kabat numbering. In some embodiments, the substitution is relative to a human germline light chain framework region sequence.

[0408] In some embodiments, the anti-TCRβV antibody molecule, e.g., anti-TCRβ V6 (e.g., anti-TCRβ V6-5*01) antibody molecule, comprises the heavy chain framework region 1 of A-H.1 or A-H.2, e.g., as shown in FIG. 2A. In some embodiments, the anti-TCRβV antibody molecule, e.g., anti-TCRβ V6 (e.g., anti-TCRβ V6-5*01) antibody molecule, comprises the heavy chain framework region 2 of A-H.1 or A-H.2, e.g., as shown in FIG. 2A. In some embodiments, the anti-TCRβV antibody molecule, e.g., anti-TCRβ V6 (e.g., anti-TCRβ V6-5*01) antibody molecule, comprises the heavy chain framework region 3 of A-H.1 or A-H.2, e.g., as shown in FIG. 2A. In some embodiments, the anti-TCRβV antibody molecule, e.g., anti-TCRβ V6 (e.g., anti-TCRβ V6-5*01) antibody molecule, comprises the heavy chain framework region 4 of A-H.1 or A-H.2, e.g., as shown in FIG. 2A.

[0409] In some embodiments, the anti-TCRβV antibody molecule, e.g., anti-TCRβ V6 (e.g., anti-TCRβ V6-5*01) antibody molecule, comprises a heavy chain variable domain comprising a framework region, e.g., framework region 3 (FR3), comprising a change, e.g., a substitution (e.g., a conservative substitution) at a position as described herein according to Kabat numbering. In some embodiments, FR3 comprises a Threonine at position 73, e.g., a substitution at position 73 according to Kabat numbering, e.g., a Glutamic Acid to Threonine substitution. In some embodiments, FR3 comprises a Glycine at position 94, e.g., a substitution at position 94 according to Kabat numbering, e.g., an Arginine to Glycine substitution. In some embodiments, the substitution is relative to a human germline heavy chain framework region sequence.

[0410] In some embodiments, the anti-TCRβV antibody molecule, e.g., anti-TCRβ V6 (e.g., anti-TCRβ V6-5*01) antibody molecule, comprises a heavy chain variable domain comprising a framework region 3 (FR3) comprising a Threonine at position 73, e.g., a substitution at position 73 according to Kabat numbering, e.g., a Glutamic Acid to Threonine substitution, and a Glycine at position 94, e.g., a substitution at position 94 according to Kabat numbering, e.g., a Arginine to Glycine substitution, e.g., as shown in the amino acid sequence of SEQ ID NO: 10.

[0411] In some embodiments, the anti-TCRβV antibody molecule, e.g., anti-TCRβ V6 (e.g., anti-TCRβ V6-5*01) antibody molecule, comprises the heavy chain framework regions 1-4 of A-H.1 or A-H.2, e.g., SEQ ID NO: 9, or as shown in FIGS. 2A and 2B. In some embodiments, the anti-TCRβV antibody molecule, e.g., anti-TCRβ V6 (e.g., anti-TCRβ V6-5*01) antibody molecule, comprises the light chain framework regions 1-4 of A-H.1, e.g., SEQ ID NO: 10, or as shown in FIGS. 2A and 2B. In some embodiments, the anti-TCRβV antibody molecule, e.g., anti-TCRβ V6 (e.g., anti-TCRβ V6-5*01) antibody molecule, comprises the light chain framework regions 1-4 of A-H.2, e.g., SEQ ID NO: 11, or as shown in FIGS. 2A and 2B. In some embodiments, the anti-TCRβV antibody molecule, e.g., anti-TCRβ V6 (e.g., anti-TCRβ V6-5*01) antibody molecule, comprises the heavy chain framework regions 1-4 of A-H.1, e.g., SEQ ID NO: 9; and the light chain framework regions 1-4 of A-H.1, e.g., SEQ ID NO: 10, or as shown in FIGS. 2A and 2B. In some embodiments, the anti-TCRβV antibody molecule, e.g., anti-TCRβ V6 (e.g., anti-TCRβ V6-5*01) antibody molecule, comprises the heavy chain framework regions 1-4 of A-H.2, e.g., SEQ ID NO: 9; and the light chain framework regions 1-4 of A-H.2, e.g., SEQ ID NO: 11, or as shown in FIGS. 2A and 2B.

[0412] In some embodiments, the heavy or light chain variable domain, or both, of the anti-TCRβV antibody molecule, e.g., anti-TCRβ V6 (e.g., anti-TCRβ V6-5*01) antibody molecule, includes an amino acid sequence, which is substantially identical to an amino acid as described herein, e.g., at least 80%, 85%, 90%, 92%, 95%, 97%, 98%, 99% or higher identical to a variable region of an antibody described herein, e.g., an antibody chosen from any one of A-H.1 to A-H.85, e.g., A-H.1, A-H.2 or A-H.68, or as described in Table 1, or encoded by the nucleotide sequence in Table 1; or which differs at least 1 or 5 residues, but less than 40, 30, 20, or 10 residues, from a variable region of an antibody described herein.

[0413] In some embodiments, the anti-TCRβV antibody molecule, e.g., anti-TCRβ V6 (e.g., anti-TCRβ V6-5*01) antibody molecule, comprises at least one, two, three, or four antigen-binding regions, e.g., variable regions, having an amino acid sequence as set forth in Table 1, or a sequence substantially identical thereto (e.g., a sequence at least about 85%, 90%, 95%, 99% or more identical thereto, or which differs by no more than 1, 2, 5, 10, or 15 amino acid residues from the sequences shown in Table 1. In another embodiment, the anti-TCRβV antibody molecule, e.g., anti-TCRβ V6 (e.g., anti-TCRβ V6-5*01) antibody molecule includes a VH and/or VL domain encoded by a nucleic acid having a nucleotide sequence as set forth in Table 1, or a sequence substantially identical thereto (e.g., a sequence at least about 85%, 90%, 95%, 99% or more identical thereto, or which differs by no more than 3, 6, 15, 30, or 45 nucleotides from the sequences shown in Table 1.

[0414] In some embodiments, the anti-TCRβV antibody molecule, e.g., anti-TCRβ V6 (e.g., anti-TCRβ V6-5*01) antibody molecule, comprises: a VH domain comprising the amino acid sequence of SEQ ID NO: 9, an amino acid sequence at least about 85%, 90%, 95%, 99% or more identical to the amino acid sequence of SEQ ID NO: 9, or an amino acid sequence which differs by no more than 1, 2, 5, 10, or 15 amino acid residues from the amino acid sequence of SEQ ID NO: 9; and/or a VL domain comprising the amino acid sequence of SEQ ID NO: 10, an amino acid sequence at least about 85%, 90%, 95%, 99% or more identical to the amino acid sequence of SEQ ID NO: 10, or an amino acid sequence which differs by no more than 1, 2, 5, 10, or 15 amino acid residues from the amino acid sequence of SEQ ID NO: 10.

[0415] In some embodiments, the anti-TCRβV antibody molecule, e.g., anti-TCRβ V6 (e.g., anti-TCRβ V6-5*01) antibody molecule, comprises: a VH domain comprising the amino acid sequence of SEQ ID NO: 9, an amino acid sequence at least about 85%, 90%, 95%, 99% or more identical to the amino acid sequence of SEQ ID NO: 9, or an amino acid sequence which differs by no more than 1, 2, 5, 10, or 15 amino acid residues from the amino acid sequence of SEQ ID NO: 9; and/or a VL domain comprising the amino acid sequence of SEQ ID NO: 11, an amino acid sequence at least about 85%, 90%, 95%, 99% or more identical to the amino acid sequence of SEQ ID NO: 11, or an amino acid sequence which differs by no more than 1, 2, 5, 10, or 15 amino acid residues from the amino acid sequence of SEQ ID NO: 11.

[0416] In some embodiments, the anti-TCRβV antibody molecule, e.g., anti-TCRβ V6 (e.g., anti-TCRβ V6-5*01) antibody molecule is a full antibody or fragment thereof (e.g., a Fab, F(ab′)₂, Fv, single domain antibody, or a single chain Fv fragment (scFv)). In embodiments, the anti-TCRβV antibody molecule, e.g., anti-TCRβ V6 (e.g., anti-TCRβ V6-5*01) antibody molecule is a monoclonal antibody or an antibody with single specificity. In some embodiments, the anti-TCRβV antibody molecule, e.g., anti-TCRβ V6 (e.g., anti-TCRβ V6-5*01) antibody molecule, can also be a humanized, chimeric, camelid, shark, or an in vitro-generated antibody molecule. In some embodiments, the anti-TCRβV antibody molecule, e.g., anti-TCRβ V6 (e.g., anti-TCRβ V6-5*01) antibody molecule, is a humanized antibody molecule. The heavy and light chains of the anti-TCRβV antibody molecule, e.g., anti-TCRβ V6 (e.g., anti-TCRβ V6-5*01) antibody molecule, can be full-length (e.g., an antibody can include at least one, and preferably two, complete heavy chains, and at least one, and preferably two, complete light chains) or can include an antigen-binding fragment (e.g., a Fab, F(ab′)2, Fv, a single chain Fv fragment, a single domain antibody, a diabody (dAb), a bivalent antibody, or bispecific antibody or fragment thereof, a single domain variant thereof, or a camelid antibody).

[0417] In some embodiments, the anti-TCRβV antibody molecule, e.g., anti-TCRβ V6 (e.g., anti-TCRβ V6-5*01) antibody molecule, is in the form of a multispecific molecule, e.g., a bispecific molecule, e.g., as described herein.

[0418] In some embodiments, the anti-TCRβV antibody molecule, e.g., anti-TCRβ V6 (e.g., anti-TCRβ V6-5*01) antibody molecule, has a heavy chain constant region (Fc) chosen from, e.g., the heavy chain constant regions of IgG1, IgG2, IgG3, IgG4, IgM, IgA1, IgA2, IgD, and IgE. In some embodiments, the Fc region is chosen from the heavy chain constant regions of IgG1, IgG2, IgG3, and IgG4. In some embodiments, the Fc region is chosen from the heavy chain constant region of IgG1 or IgG2 (e.g., human IgG1, or IgG2). In some embodiments, the heavy chain constant region is human IgG1. In some embodiments, the Fc region comprises a Fc region variant, e.g., as described herein.

[0419] In some embodiments, the anti-TCRβV antibody molecule, e.g., anti-TCRβ V6 (e.g., anti-TCRβ V6-5*01) antibody molecule, has a light chain constant region chosen from, e.g., the light chain constant regions of kappa or lambda, preferably kappa (e.g., human kappa). In some embodiments, the constant region is altered, e.g., mutated, to modify the properties of the anti-TCRβV antibody molecule, e.g., anti-TCRβ V6 (e.g., anti-TCRβ V6-5*01) antibody molecule (e.g., to increase or decrease one or more of: Fe receptor binding, antibody glycosylation, the number of cysteine residues, effector cell function, or complement function). For example, the constant region is mutated at positions 296 (M to Y), 298 (S to T), 300 (T to E), 477 (H to K) and 478 (N to F) to alter Fc receptor binding (e.g., the mutated positions correspond to positions 132 (M to Y), 134 (S to T), 136 (T to E), 313 (H to K) and 314 (N to F) of SEQ ID NOs: 212 or 214; or positions 135 (M to Y), 137 (S to T), 139 (T to E), 316 (H to K) and 317 (N to F) of SEQ ID NOs: 215, 216, 217 or 218), e.g., relative to human IgG1.

[0420] Antibody A-H.1 comprises a heavy chain comprising the amino acid sequence of SEQ ID NO: 3278 and a light chain comprising the amino acid sequence of SEQ ID NO: 72. Antibody A-H.2 comprises a heavy chain comprising the amino acid sequence of SEQ ID NO: 3278 and a light chain comprising the amino acid sequence of SEQ ID NO: 3279. Antibody A-H.68 comprises the amino acid sequence of SEQ ID NO: 1337, or a sequence having at least 85%, 90%, 95%, 96%, 97%, 98%, 99%, 99.5%, 99.9%, or 100% sequence identity thereto. Antibody A-H.69 comprises the amino acid sequence of SEQ ID NO: 1500, or a sequence having at least 85%, 90%, 95%, 96%, 97%, 98%, 99%, 99.5%, 99.9%, or 100% sequence identity thereto.

[0421] Additional exemplary humanized anti-TCRB V6 antibodies are provided in Table 1. In some embodiments, the anti-TCRβ V6 is antibody A, e.g., humanized antibody A (antibody A-H), as provided in Table 1. In some embodiments, the anti-TCRβV antibody comprises one or more (e.g., all three) of a LC CDR1, LC CDR2, and LC CDR3 provided in Table 1; and/or one or more (e.g., all three) of a HC CDR1, HC CDR2, and HC CDR3 provided in Table 1, or a sequence with at least 85%, 90%, 95%, 96%, 97%, 98%, 99%, 99.5%, 99.9%, or 100% sequence identity thereto. In some embodiments, antibody A comprises a variable heavy chain (VH) and/or a variable light chain (VL) provided in Table 1, or a sequence with at least 85%, 90%, 95%, 96%, 97%, 98%, 99%, 99.5%, 99.9%, or 100% sequence identity thereto.

[0422] In some embodiments, the anti-TCRβV antibody molecule, e.g., anti-TCRβ V6 (e.g., anti-TCRβ V6-5*01) antibody molecule comprises a VH of A-H.1, A-H.2, A-H.3, A-H.4, A-H.5, A-H.6, A-H.7, A-H.8, A-H.9, A-H.10, A-H.11, A-H.12, A-H.13, A-H.14, A-H.15, A-H.16, A-H.17, A-H.18, A-H.19, A-H.20, A-H.21, A-H.22, A-H.23, A-H.24, A-H.25, A-H.26, A-H.27, A-H.28, A-H.29, A-H.30, A-H.31, A-H.32, A-H.33, A-H.34, A-H.35, A-H.36, A-H.37, A-H.38, A-H.39, A-H.40, A-H.1, A-H.42, A-H.43, A-H.44, A-H.45, A-H.46, A-H.47, A-H.48, A-H.49, A-H.50, A-H.51, A-H.52, A-H.53, A-H.54, A-H.55, A-H.56, A-H.57, A-H.58, A-H.59, A-H.60, A-H.61, A-H.62, A-H.63, A-H.64, A-H.65, A-H.66, A-H.67, A-H.68, A-H.69, A-H.70, A-H.71, A-H.72, A-H.73, A-H.74, A-H.75, A-H.76, A-H.77, A-H.78, A-H.79, A-H.80, A-H.81, A-H.82, A-H.83, A-H.84, or A-H.85, or a sequence with at least 80%, 85%, 90%, 95%, 96%, 97%, 98%, 99% or more identity thereto.

[0423] In some embodiments, the anti-TCRβV antibody molecule, e.g., anti-TCRβ V6 (e.g., anti-TCRβ V6-5*01) antibody molecule comprises a VL of A-H.1, A-H.2, A-H.3, A-H.4, A-H.5, A-H.6, A-H.7, A-H.8, A-H.9, A-H.10, A-H.11, A-H.12, A-H.13, A-H.14, A-H.15, A-H.16, A-H.17, A-H.18, A-H.19, A-H.20, A-H.21, A-H.22, A-H.23, A-H.24, A-H.25, A-H.26, A-H.27, A-H.28, A-H.29, A-H.30, A-H.31, A-H.32, A-H.33, A-H.34, A-H.35, A-H.36, A-H.37, A-H.38, A-H.39, A-H.40, A-H.1, A-H.42, A-H.43, A-H.44, A-H.45, A-H.46, A-H.47, A-H.48, A-H.49, A-H.50, A-H.51, A-H.52, A-H.53, A-H.54, A-H.55, A-H.56, A-H.57, A-H.58, A-H.59, A-H.60, A-H.61, A-H.62, A-H.63, A-H.64, A-H.65, A-H.66, A-H.67, A-H.68, A-H.69, A-H.70, A-H.71, A-H.72, A-H.73, A-H.74, A-H.75, A-H.76, A-H.77, A-H.78, A-H.79, A-H.80, A-H.81, A-H.82, A-H.83, A-H.84, or A-H.85, or a sequence with at least 80%, 85%, 90%, 95%, 96%, 97%, 98%, 99% or more identity thereto.

[0424] In some embodiments, the anti-TCRβV antibody molecule, e.g., anti-TCRβ V6 (e.g., anti-TCRβ V6-5*01) antibody molecule comprises a VH of A-H.1, A-H.2, A-H.3, A-H.4, A-H.5, A-H.6, A-H.7, A-H.8, A-H.9, A-H.10, A-H.11, A-H.12, A-H.13, A-H.14, A-H.15, A-H.16, A-H.17, A-H.18, A-H.19, A-H.20, A-H.21, A-H.22, A-H.23, A-H.24, A-H.25, A-H.26, A-H.27, A-H.28, A-H.29, A-H.30, A-H.31, A-H.32, A-H.33, A-H.34, A-H.35, A-H.36, A-H.37, A-H.38, A-H.39, A-H.40, A-H.1, A-H.42, A-H.43, A-H.44, A-H.45, A-H.46, A-H.47, A-H.48, A-H.49, A-H.50, A-H.51, A-H.52, A-H.53, A-H.54, A-H.55, A-H.56, A-H.57, A-H.58, A-H.59, A-H.60, A-H.61, A-H.62, A-H.63, A-H.64, A-H.65, A-H.66, A-H.67, A-H.68, A-H.69, A-H.70, A-H.71, A-H.72, A-H.73, A-H.74, A-H.75, A-H.76, A-H.77, A-H.78, A-H.79, A-H.80, A-H.81, A-H.82, A-H.83, A-H.84, or A-H.85, or a sequence with at least 80%, 85%, 90%, 95%, 96%, 97%, 98%, 99% or more identity thereto; and a VL of A-H.1, A-H.2, A-H.3, A-H.4, A-H.5, A-H.6, A-H.7, A-H.8, A-H.9, A-H.10, A-H.11, A-H.12, A-H.13, A-H.14, A-H.15, A-H.16, A-H.17, A-H.18, A-H.19, A-H.20, A-H.21, A-H.22, A-H.23, A-H.24, A-H.25, A-H.26, A-H.27, A-H.28, A-H.29, A-H.30, A-H.31, A-H.32, A-H.33, A-H.34, A-H.35, A-H.36, A-H.37, A-H.38, A-H.39, A-H.40, A-H.1, A-H.42, A-H.43, A-H.44, A-H.45, A-H.46, A-H.47, A-H.48, A-H.49, A-H.50, A-H.51, A-H.52, A-H.53, A-H.54, A-H.55, A-H.56, A-H.57, A-H.58, A-H.59, A-H.60, A-H.61, A-H.62, A-H.63, A-H.64, A-H.65, A-H.66, A-H.67, A-H.68, A-H.69, A-H.70, A-H.71, A-H.72, A-H.73, A-H.74, A-H.75, A-H.76, A-H.77, A-H.78, A-H.79, A-H.80, A-H.81, A-H.82, A-H.83, A-H.84, or A-H.85, or a sequence with at least 80%, 85%, 90%, 95%, 96%, 97%, 98%, 99% or more identity thereto.

[0425] Exemplary anti-TCRβV antibody molecules and the corresponding TCRβV subfamilies recognized by said anti-TCRβV antibody molecules are disclosed in Table 10A.

[0426] The various TCRβV subfamilies and/or subfamily members can be expressed at different levels in individuals, e.g., healthy individuals, as disclosed in Kitaura K. et al (2016), BMC Immunology vol 17:38, the entire contents of which are hereby incorporated by reference. For example, TCRβ V6-5 is represented in approximately 3-6% healthy donors.

[0427] The representation of various TCRβV subfamilies and/or subfamily members can also be different in cancer cells. For example, TCRβV is present in about 3-6% of tumor infiltrating T cells irrespective of tumor type (see Li B. et al., Nature Genetics, 2016, vol:48(7):725-32 the entire contents of which are hereby incorporated by references). Li et al., also disclose that TCRβ V6-5 is present at a high frequency in tumor cells.

### Anti-TCRβ V6 Antibodies

[0428] In one aspect, provided herein is an anti-TCRβV antibody molecule that binds to human TCRβ V6, e.g., a TCRβ V6 subfamily comprising: TCRβ V6-4*01, TCRβ V6-4*02, TCRβ V6-9*01, TCRβ V6-8*01, TCRβ V6-5*01, TCRβ V6-6*02, TCRβ V6-6*01, TCRβ V6-2*01, TCRβ V6-3*01 or TCRβ V6-1*01. In some embodiments the TCRβ V6 subfamily comprises TCRβ V6-5*01 or a variant thereof. In some embodiments, TCRβ V6 comprises TCRβ V6-4*01, or a variant thereof. In some embodiments, TCRβ V6 comprises TCRβ V6-4*02, or a variant thereof. In some embodiments, TCRβ V6 comprises TCRβ V6-9*01, or a variant thereof. In some embodiments, TCRβ V6 comprises TCRβ V6-8*01, or a variant thereof. In some embodiments, TCRβ V6 comprises TCRβ V6-5*01, or a variant thereof. In some embodiments, TCRβ V6 comprises TCRβ V6-6*02, or a variant thereof. In some embodiments, TCRβ V6 comprises TCRβ V6-6*01, or a variant thereof. In some embodiments, TCRβ V6 comprises TCRβ V6-2*01, or a variant thereof. In some embodiments, TCRβ V6 comprises TCRβ V6-3*01, or a variant thereof. In some embodiments, TCRβ V6 comprises TCRβ V6-1*01, or a variant thereof.

[0429] In some embodiments, TCRβ V6-5*01 is encoded by the nucleic acid sequence of SEQ ID NO: 43, or a sequence having 85%, 90%, 95%, 99% or more identity thereof. In some embodiments, TCRβ V6-5*01 comprises the amino acid sequence of SEQ ID NO: 44, or an amino acid sequence having 85%, 90%, 95%, 99% or more identity thereof.

[0430] In some embodiments, the anti-TCRβV antibody molecule, e.g., anti-TCRβ V6 (e.g., anti-TCRβ V6-5*01) antibody molecule, is a non-murine antibody molecule, e.g., a human or humanized antibody molecule. In some embodiments, the anti-TCRβV antibody molecule, e.g., anti-TCRβ V6 (e.g., anti-TCRβ V6-5*01) antibody molecule is a human antibody molecule. In some embodiments, the anti-TCRβV antibody molecule, e.g., anti-TCRβ V6 (e.g., anti-TCRβ V6-5*01) antibody molecule is a humanized antibody molecule.

[0431] In some embodiments, the anti-TCRβV antibody molecule, e.g., anti-TCRβ V6 (e.g., anti-TCRβ V6-5*01) antibody molecule, is isolated or recombinant.

[0432] In some embodiments, the anti-TCRβV antibody molecule, e.g., anti-TCRβ V6 (e.g., anti-TCRβ V6-5*01) antibody molecule, comprises at least one antigen-binding region, e.g., a variable region or an antigen-binding fragment thereof, from an antibody described herein, e.g., an antibody chosen from any one of A-H.1 to A-H.85, e.g., A-H.1, A-H.2 or A-H.68, or an antibody described in Table 1, or encoded by a nucleotide sequence in Table 1, or a sequence substantially identical (e.g., at least 80%, 85%, 90%, 92%, 95%, 97%, 98%, 99% or higher identical) to any of the aforesaid sequences.

[0433] In some embodiments, the anti-TCRβV antibody molecule, e.g., anti-TCRβ V6 (e.g., anti-TCRβ V6-5*01) antibody molecule, comprises at least one, two, three or four variable regions from an antibody described herein, e.g., an antibody chosen from any one of A-H.1 to A-H.85, e.g., A-H.1, A-H.2 or A-H.68, or an antibody described in Table 1, or encoded by a nucleotide sequence in Table 1, or a sequence substantially identical (e.g., at least 80%, 85%, 90%, 92%, 95%, 97%, 98%, 99% or higher identical) to any of the aforesaid sequences.

[0434] In some embodiments, the anti-TCRβV antibody molecule, e.g., anti-TCRβ V6 (e.g., anti-TCRβ V6-5*01) antibody molecule, comprises at least one or two heavy chain variable regions from an antibody described herein, e.g., an antibody chosen from any one of A-H.1 to A-H.85, e.g., A-H.1, A-H.2 or A-H.68, or an antibody molecule described in Table 1, or encoded by a nucleotide sequence in Table 1, or a sequence substantially identical (e.g., at least 80%, 85%, 90%, 92%, 95%, 97%, 98%, 99% or higher identical) to any of the aforesaid sequences.

[0435] In some embodiments, the anti-TCRβV antibody molecule comprises a heavy chain variable region (VH) having a consensus sequence of SEQ ID NO: 231 or 3290.

-Consensus VH
SEQ ID NO: 231
QVQLVQSGAEVKKPGSSVKVSCKASGH/T/G/YD/T/SFH/R/D/K/
TL/D/K/T/NW/F/T/I/Y/GYIHWVRQAPGQGLEWMGR/WV/I/FF/
S/YA/PGSGN/ST/V/Y/IK/RYNEKFKGRVTITADTSTSTAYMELSSL
RSEDTAVYYCAG/VSY/IYSY/AD/GVLDYWGQGTTVTVSS

[0436] SEQ ID NO: 3290—Consensus VH QVQLVQSGAEVKKPGSSVKVSCKASGX₁X₂FX₃X₄X₅YIHWVRQAPGQGLEWMGX₆X₇X₈X₉GSGX₁₀X₁₀X₁₂YNEKFKGRVTITADTSTSTAYMELSSLRSEDTAVYYCAX₁₃SX₁₄YSX₁₅X₁₆VLDYWGQGTT VTVSS, where-in: X1 is H or T or G or Y; X2 is D or T or S; X3 is H or R or D or K or T; X4 is L or D or K or T or N; X5 is W or F or T or I or Y or G; X6 is R or W; X7 is V or I or F; X8 is F or S or Y; X9 is A or P; X10 is N or S; X11 is T or V or Y or I; X12 is K or R; X13 is G or V; X14 is Y or I; X15 is Y or A; and X16 is D or G.

[0437] In some embodiments, the anti-TCRβV antibody molecule, e.g., anti-TCRβ V6 (e.g., anti-TCRβ V6-5*01) antibody molecule, comprises at least one or two light chain variable regions from an antibody described herein, e.g., an antibody chosen from any one of A-H.1 to A-H.85, e.g., A-H.1, A-H.2 or A-H.68, or an antibody described in Table 1, or encoded by a nucleotide sequence in Table 1, or a sequence substantially identical (e.g., at least 80%, 85%, 90%, 92%, 95%, 97%, 98%, 99% or higher identical) to any of the aforesaid sequences.

[0438] In some embodiments, the anti-TCRβV antibody molecule comprises a light chain variable region (VL) having a consensus sequence of SEQ ID NO: 230 or 3289.

-Consensus VL
SEQ ID NO: 230
DIQMTQSPSFLSASVGDRVTITCKASQNVG/E/A/DN/DR/KVAWY/HQ
QKPGKAPKALIYSSSHRYK/SGVPSRFSGSGSGTEFTLTISSLQPEDFA
TYFCQQFKSYPLTFGQGTKLEIK

SEQ ID NO: 3289—Consensus VL DIQMTQSPSFLSASVGDRVTITCKASQNVX₁X₂X₃VAWX₄QQKPGKAPKALIYSSSHRYX₅GVPSRF SGSGSGTEFTLTISSLQPEDFATYFCQQFKSYPLTFGQGTKLEIK, wherein X1 is G, E, A or D; X2 is N or D; X3 is R or K; X4 is Y or H; and X5 is K or S

[0439] In some embodiments, the anti-TCRβV antibody molecule, e.g., anti-TCRβ V6 (e.g., anti-TCRβ V6-5*01) antibody molecule, comprises a heavy chain constant region for an IgG4, e.g., a human IgG4. In still another embodiment, the anti-TCRβV antibody molecule, e.g., anti-TCRβ V6 (e.g., anti-TCRβ V6-5*01) antibody molecule includes a heavy chain constant region for an IgG1, e.g., a human IgG1. In some embodiments, the heavy chain constant region comprises an amino sequence set forth in Table 3, or a sequence substantially identical (e.g., at least 80%, 85%, 90%, 92%, 95%, 97%, 98%, 99% or higher identical) thereto.

[0440] In some embodiments, the anti-TCRβV antibody molecule, e.g., anti-TCRβ V6 (e.g., anti-TCRβ V6-5*01) antibody molecule, includes a kappa light chain constant region, e.g., a human kappa light chain constant region. In some embodiments, the light chain constant region comprises an amino sequence set forth in Table 3, or a sequence substantially identical (e.g., at least 80%, 85%, 90%, 92%, 95%, 97%, 98%, 99% or higher identical) thereto.

[0441] In some embodiments, the anti-TCRβV antibody molecule, e.g., anti-TCRβ V6 (e.g., anti-TCRβ V6-5*01) antibody molecule, includes at least one, two, or three complementarity determining regions (CDRs) from a heavy chain variable region (VH) of an antibody described herein, e.g., an antibody chosen from any one of A-H.1 to A-H.85, e.g., A-H.1, A-H.2 or A-H.68, or an antibody described in Table 1, or encoded by a nucleotide sequence in Table 1, or a sequence substantially identical (e.g., at least 80%, 85%, 90%, 92%, 95%, 97%, 98%, 99% or higher identical) to any of the aforesaid sequences.

[0442] In some embodiments, the anti-TCRβV antibody molecule, e.g., anti-TCRβ V6 (e.g., anti-TCRβ V6-5*01) antibody molecule, includes at least one, two, or three CDRs (or collectively all of the CDRs) from a heavy chain variable region comprising an amino acid sequence shown in Table 1, or encoded by a nucleotide sequence shown in Table 1. In some embodiments, one or more of the CDRs (or collectively all of the CDRs) have one, two, three, four, five, six or more changes, e.g., amino acid substitutions or deletions, relative to the amino acid sequence shown in Table 1, or encoded by a nucleotide sequence shown in Table 1.

[0443] In some embodiments, the anti-TCRβV antibody molecule, e.g., anti-TCRβ V6 (e.g., anti-TCRβ V6-5*01) antibody molecule, includes at least one, two, or three complementarity determining regions (CDRs) from a light chain variable region of an antibody described herein, e.g., an antibody chosen from any one of A-H.1 to A-H.85, e.g., A-H.1, A-H.2 or A-H.68, or an antibody described in Table 1, or encoded by a nucleotide sequence in Table 1, or a sequence substantially identical (e.g., at least 80%, 85%, 90%, 92%, 95%, 97%, 98%, 99% or higher identical) to any of the aforesaid sequences.

[0444] In some embodiments, the anti-TCRβV antibody molecule, e.g., anti-TCRβ V6 (e.g., anti-TCRβ V6-5*01) antibody molecule, includes at least one, two, or three CDRs (or collectively all of the CDRs) from a light chain variable region comprising an amino acid sequence shown in Table 1, or encoded by a nucleotide sequence shown in Table 1. In some embodiments, one or more of the CDRs (or collectively all of the CDRs) have one, two, three, four, five, six or more changes, e.g., amino acid substitutions or deletions, relative to the amino acid sequence shown in Table 1, or encoded by a nucleotide sequence shown in Table 1.

[0445] In some embodiments, the anti-TCRβV antibody molecule, e.g., anti-TCRβ V6 (e.g., anti-TCRβ V6-5*01) antibody molecule, includes at least one, two, three, four, five or six CDRs (or collectively all of the CDRs) from a heavy and light chain variable region comprising an amino acid sequence shown in Table 1, or encoded by a nucleotide sequence shown in Table 1. In some embodiments, one or more of the CDRs (or collectively all of the CDRs) have one, two, three, four, five, six or more changes, e.g., amino acid substitutions or deletions, relative to the amino acid sequence shown in Table 1, or encoded by a nucleotide sequence shown in Table 1.

[0446] In some embodiments, the anti-TCRβV antibody molecule, e.g., anti-TCRβ V6 (e.g., anti-TCRβ V6-5*01) antibody molecule, molecule includes all six CDRs from an antibody described herein, e.g., an antibody chosen from any one of A-H.1 to A-H.85, e.g., A-H.1, A-H.2 or A-H.68, or an antibody described in Table 1, or encoded by a nucleotide sequence in Table 1, or closely related CDRs, e.g., CDRs which are identical or which have at least one amino acid alteration, but not more than two, three or four alterations (e.g., substitutions, deletions, or insertions, e.g., conservative substitutions). In some embodiments, the anti-TCRβV antibody molecule, e.g., anti-TCRβ V6 (e.g., anti-TCRβ V6-5*01) antibody molecule, may include any CDR described herein.

[0447] In some embodiments, the anti-TCRβV antibody molecule, e.g., anti-TCRβ V6 (e.g., anti-TCRβ V6-5*01) antibody molecule includes at least one, two, or three CDRs according to Kabat et al. (e.g., at least one, two, or three CDRs according to the Kabat definition as set out in Table 1) from a heavy chain variable region of an antibody described herein, e.g., an antibody chosen from any one of A-H.1 to A-H.85, e.g., A-H.1, A-H.2 or A-H.68, or an antibody described in Table 1, or a sequence substantially identical (e.g., at least 80%, 85%, 90%, 92%, 95%, 97%, 98%, 99% or higher identical) to any of the aforesaid sequences; or which have at least one amino acid alteration, but not more than two, three or four alterations (e.g., substitutions, deletions, or insertions, e.g., conservative substitutions) relative to one, two, or three CDRs according to Kabat et al. shown in Table 1.

[0448] In some embodiments, the anti-TCRβV antibody molecule, e.g., anti-TCRβ V6 (e.g., anti-TCRβ V6-5*01) antibody molecule includes at least one, two, or three CDRs according to Kabat et al. (e.g., at least one, two, or three CDRs according to the Kabat definition as set out in Table 1) from a light chain variable region of an antibody described herein, e.g., an antibody chosen from any one of A-H.1 to A-H.85, e.g., A-H.1, A-H.2 or A-H.68, or an antibody described in Table 1, or a sequence substantially identical (e.g., at least 80%, 85%, 90%, 92%, 95%, 97%, 98%, 99% or higher identical) to any of the aforesaid sequences; or which have at least one amino acid alteration, but not more than two, three or four alterations (e.g., substitutions, deletions, or insertions, e.g., conservative substitutions) relative to one, two, or three CDRs according to Kabat et al. shown in Table 1.

[0449] In some embodiments, the anti-TCRβV antibody molecule, e.g., anti-TCRβ V6 (e.g., anti-TCRβ V6-5*01) antibody molecule, includes at least one, two, three, four, five, or six CDRs according to Kabat et al. (e.g., at least one, two, three, four, five, or six CDRs according to the Kabat definition as set out in Table 1) from the heavy and light chain variable regions of an antibody described herein, e.g., an antibody chosen from any one of A-H.1 to A-H.85, e.g., A-H.1, A-H.2 or A-H.68, or an antibody described in Table 1, or encoded by a nucleotide sequence in Table 1; or a sequence substantially identical (e.g., at least 80%, 85%, 90%, 92%, 95%, 97%, 98%, 99% or higher identical) to any of the aforesaid sequences; or which have at least one amino acid alteration, but not more than two, three or four alterations (e.g., substitutions, deletions, or insertions, e.g., conservative substitutions) relative to one, two, three, four, five, or six CDRs according to Kabat et al. shown in Table 1.

[0450] In some embodiments, the anti-TCRβV antibody molecule, e.g., anti-TCRβ V6 (e.g., anti-TCRβ V6-5*01) antibody molecule, includes all six CDRs according to Kabat et al. (e.g., all six CDRs according to the Kabat definition as set out in Table 1) from the heavy and light chain variable regions of an antibody described herein, e.g., an antibody chosen from any one of A-H.1 to A-H.85, e.g., A-H.1, A-H.2 or A-H.68, or an antibody described in Table 1, or encoded by a nucleotide sequence in Table 1; or a sequence substantially identical (e.g., at least 80%, 85%, 90%, 92%, 95%, 97%, 98%, 99% or higher identical) to any of the aforesaid sequences; or which have at least one amino acid alteration, but not more than two, three or four alterations (e.g., substitutions, deletions, or insertions, e.g., conservative substitutions) relative to all six CDRs according to Kabat et al. shown in Table 1. In some embodiments, the anti-TCRβV antibody molecule, e.g., anti-TCRβ V6 (e.g., anti-TCRβ V6-5*01) antibody molecule, may include any CDR described herein.

[0451] In some embodiments, the anti-TCRβV antibody molecule, e.g., anti-TCRβ V6 (e.g., anti-TCRβ V6-5*01) antibody molecule, includes at least one, two, or three hypervariable loops that have the same canonical structures as the corresponding hypervariable loop of an antibody described herein, e.g., an antibody chosen from chosen from any one of A-H.1 to A-H.85, e.g., A-H.1, A-H.2 or A-H.68, e.g., the same canonical structures as at least loop 1 and/or loop 2 of the heavy and/or light chain variable domains of an antibody described herein. See, e.g., Chothia et al., (1992) J. Mol. Biol. 227:799-817; Tomlinson et al., (1992) J. Mol. Biol. 227:776-798 for descriptions of hypervariable loop canonical structures. These structures can be determined by inspection of the tables described in these references.

[0452] In some embodiments, the anti-TCRβV antibody molecule, e.g., anti-TCRβ V6 (e.g., anti-TCRβ V6-5*01) antibody molecule includes at least one, two, or three CDRs according to Chothia et al. (e.g., at least one, two, or three CDRs according to the Chothia definition as set out in Table 1) from a heavy chain variable region of an antibody described herein, e.g., an antibody chosen from any one of A-H.1 to A-H.85, e.g., A-H.1, A-H.2 or A-H.68, or as described in Table 1, or a sequence substantially identical (e.g., at least 80%, 85%, 90%, 92%, 95%, 97%, 98%, 99% or higher identical) to any of the aforesaid sequences; or which have at least one amino acid alteration, but not more than two, three or four alterations (e.g., substitutions, deletions, or insertions, e.g., conservative substitutions) relative to one, two, or three CDRs according to Chothia et al. shown in Table 1.

[0453] In some embodiments, the anti-TCRβV antibody molecule, e.g., anti-TCRβ V6 (e.g., anti-TCRβ V6-5*01) antibody molecule includes at least one, two, or three CDRs according to Chothia et al. (e.g., at least one, two, or three CDRs according to the Chothia definition as set out in Table 1) from a light chain variable region of an antibody described herein, e.g., an antibody chosen from any one of A-H.1 to A-H.85, e.g., A-H.1, A-H.2 or A-H.68, or an antibody described in Table 1, or a sequence substantially identical (e.g., at least 80%, 85%, 90%, 92%, 95%, 97%, 98%, 99% or higher identical) to any of the aforesaid sequences; or which have at least one amino acid alteration, but not more than two, three or four alterations (e.g., substitutions, deletions, or insertions, e.g., conservative substitutions) relative to one, two, or three CDRs according to Chothia et al. shown in Table 1.

[0454] In some embodiments, the anti-TCRβV antibody molecule, e.g., anti-TCRβ V6 (e.g., anti-TCRβ V6-5*01) antibody molecule, includes at least one, two, three, four, five, or six CDRs according to Chothia et al. (e.g., at least one, two, three, four, five, or six CDRs according to the Chothia definition as set out in Table 1) from the heavy and light chain variable regions of an antibody described herein, e.g., an antibody chosen from any one of A-H.1 to A-H.85, e.g., A-H.1, A-H.2 or A-H.68, or an antibody described in Table 1, or encoded by the nucleotide sequence in Table 1; or a sequence substantially identical (e.g., at least 80%, 85%, 90%, 92%, 95%, 97%, 98%, 99% or higher identical) to any of the aforesaid sequences; or which have at least one amino acid alteration, but not more than two, three or four alterations (e.g., substitutions, deletions, or insertions, e.g., conservative substitutions) relative to one, two, three, four, five, or six CDRs according to Chothia et al. shown in Table 1.

[0455] In some embodiments, the anti-TCRβV antibody molecule, e.g., anti-TCRβ V6 (e.g., anti-TCRβ V6-5*01) antibody molecule, includes all six CDRs according to Chothia et al. (e.g., all six CDRs according to the Chothia definition as set out in Table 1) from the heavy and light chain variable regions of an antibody described herein, e.g., an antibody chosen from any one of A-H.1 to A-H.85, e.g., A-H.1, A-H.2 or A-H.68, or an antibody described in Table 1, or encoded by a nucleotide sequence in Table 1; or a sequence substantially identical (e.g., at least 80%, 85%, 90%, 92%, 95%, 97%, 98%, 99% or higher identical) to any of the aforesaid sequences; or which have at least one amino acid alteration, but not more than two, three or four alterations (e.g., substitutions, deletions, or insertions, e.g., conservative substitutions) relative to all six CDRs according to Chothia et al. shown in Table 1. In some embodiments, the anti-TCRβV antibody molecule, e.g., anti-TCRβ V6 (e.g., anti-TCRβ V6-5*01) antibody molecule, may include any CDR described herein.

[0456] In some embodiments, the anti-TCRβV antibody molecule, e.g., anti-TCRβ V6 (e.g., anti-TCRβ V6-5*01) antibody molecule, molecule includes a combination of CDRs or hypervariable loops defined according to Kabat et al., Chothia et al., or as described in Table 1.

[0457] In some embodiments, the anti-TCRβV antibody molecule, e.g., anti-TCRβ V6 (e.g., anti-TCRβ V6-5*01) antibody molecule, can contain any combination of CDRs or hypervariable loops according to the Kabat and Chothia definitions.

[0458] In some embodiments, a combined CDR as set out in Table 1 is a CDR that comprises a Kabat CDR and a Chothia CDR.

[0459] In some embodiments, the anti-TCRβV antibody molecule, e.g., anti-TCRβ V6 (e.g., anti-TCRβ V6-5*01) antibody molecule, molecule includes a combination of CDRs or hypervariable loops identified as combined CDRs in Table 1. In some embodiments, the anti-TCRβV antibody molecule, e.g., anti-TCRβV6 (e.g., anti-TCRβ V6-5*01) antibody molecule, can contain any combination of CDRs or hypervariable loops according the “combined” CDRs are described in Table 1.

[0460] In some embodiments, e.g., an embodiment comprising a variable region, a CDR (e.g., a combined CDR, Chothia CDR or Kabat CDR), or other sequence referred to herein, e.g., in Table 1, the antibody molecule is a monospecific antibody molecule, a bispecific antibody molecule, a bivalent antibody molecule, a biparatopic antibody molecule, or an antibody molecule that comprises an antigen binding fragment of an antibody, e.g., a half antibody or antigen binding fragment of a half antibody. In certain embodiments the antibody molecule comprises a multispecific molecule, e.g., a bispecific molecule, e.g., as described herein.

[0461] In some embodiments, the anti-TCRβV antibody molecule, e.g., anti-TCRβ V6 (e.g., anti-TCRβ V6-5*01) antibody molecule includes: (i) one, two or all of a light chain complementarity determining region 1 (LC CDR1), a light chain complementarity determining region 2 (LC CDR2), and a light chain complementarity determining region 3 (LC CDR3) of SEQ ID NO: 2, SEQ ID NO: 10 or SEQ ID NO: 11, and/or (ii) one, two or all of a heavy chain complementarity determining region 1 (HC CDR1), heavy chain complementarity determining region 2 (HC CDR2), and a heavy chain complementarity determining region 3 (HC CDR3) of SEQ ID NO: 1 or SEQ ID NO: 9.

[0462] In some embodiments, the anti-TCRβV antibody molecule, e.g., anti-TCRβ V6 (e.g., anti-TCRβ V6-5*01) antibody molecule comprises a LC CDR1, LC CDR2, and LC CDR3 of SEQ ID NO: 2, and a HC CDR1, HC CDR2, and HC CDR3 of SEQ ID NO: 1.

[0463] In some embodiments the anti-TCRβV antibody molecule, e.g., anti-TCRβ V6 (e.g., anti-TCRβ V6-5*01) antibody molecule comprises a LC CDR1, LC CDR2, and LC CDR3 of SEQ ID NO: 10, and a HC CDR1, HC CDR2, and HC CDR3 of SEQ ID NO: 9.

[0464] In some embodiments, the anti-TCRβV antibody molecule, e.g., anti-TCRβ V6 (e.g., anti-TCRβ V6-5*01) antibody molecule comprises a LC CDR1, LC CDR2, and LC CDR3 of SEQ ID NO: 11, and a HC CDR1, HC CDR2, and HC CDR3 of SEQ ID NO: 9.

[0465] In some embodiments, the anti-TCRβV antibody molecule, e.g., anti-TCRβ V6 (e.g., anti-TCRβ V6-5*01) antibody molecule comprises: (i) a LC CDR1 amino acid sequence of SEQ ID NO: 6, a LC CDR2 amino acid sequence of SEQ ID NO: 7, or a LC CDR3 amino acid sequence of SEQ ID NO: 8; and/or (ii) a HC CDR1 amino acid sequence of SEQ ID NO: 3, a HC CDR2 amino acid sequence of SEQ ID NO: 4, or a HC CDR3 amino acid sequence of SEQ ID NO: 5.

[0466] In some embodiments, the anti-TCRβV antibody molecule, e.g., anti-TCRβ V6 (e.g., anti-TCRβ V6-5*01) antibody molecule comprises: (i) a light chain variable region (VL) comprising a LC CDR1 amino acid sequence of SEQ ID NO: 6, a LC CDR2 amino acid sequence of SEQ ID NO: 7, or a LC CDR3 amino acid sequence of SEQ ID NO: 8; and/or (ii) a heavy chain variable region (VH) comprising a HC CDR1 amino acid sequence of SEQ ID NO: 3, a HC CDR2 amino acid sequence of SEQ ID NO: 4, or a HC CDR3 amino acid sequence of SEQ ID NO: 5.

[0467] In some embodiments, the anti-TCRβV antibody molecule, e.g., anti-TCRβ V6 (e.g., anti-TCRβ V6-5*01) antibody molecule comprises: (i) a LC CDR1 amino acid sequence of SEQ ID NO: 51, a LC CDR2 amino acid sequence of SEQ ID NO: 52, or a LC CDR3 amino acid sequence of SEQ ID NO: 53; and/or (ii) a HC CDR1 amino acid sequence of SEQ ID NO: 45, a HC CDR2 amino acid sequence of SEQ ID NO: 46, or a HC CDR3 amino acid sequence of SEQ ID NO: 47.

[0468] In some embodiments, the anti-TCRβV antibody molecule, e.g., anti-TCRβ V6 (e.g., anti-TCRβ V6-5*01) antibody molecule comprises: (i) a light chain variable region (VL) comprising a LC CDR1 amino acid sequence of SEQ ID NO: 51, a LC CDR2 amino acid sequence of SEQ ID NO: 52, or a LC CDR3 amino acid sequence of SEQ ID NO: 53; and/or (ii) a heavy chain variable region (VH) comprising a HC CDR1 amino acid sequence of SEQ ID NO: 45, a HC CDR2 amino acid sequence of SEQ ID NO: 46, or a HC CDR3 amino acid sequence of SEQ ID NO: 47.

[0469] In some embodiments, the anti-TCRβV antibody molecule, e.g., anti-TCRβ V6 (e.g., anti-TCRβ V6-5*01) antibody molecule comprises: (i) a LC CDR1 amino acid sequence of SEQ ID NO: 54, a LC CDR2 amino acid sequence of SEQ ID NO: 55, or a LC CDR3 amino acid sequence of SEQ ID NO: 56; and/or (ii) a HC CDR1 amino acid sequence of SEQ ID NO: 48, a HC CDR2 amino acid sequence of SEQ ID NO: 49, or a HC CDR3 amino acid sequence of SEQ ID NO: 50.

[0470] In some embodiments, the anti-TCRβV antibody molecule, e.g., anti-TCRβ V6 (e.g., anti-TCRβ V6-5*01) antibody molecule comprises: (i) a light chain variable region (VL) comprising a LC CDR1 amino acid sequence of SEQ ID NO: 54, a LC CDR2 amino acid sequence of SEQ ID NO: 55, or a LC CDR3 amino acid sequence of SEQ ID NO: 56; and/or (ii) a heavy chain variable region (VH) comprising a HC CDR1 amino acid sequence of SEQ ID NO: 48, a HC CDR2 amino acid sequence of SEQ ID NO: 49, or a HC CDR3 amino acid sequence of SEQ ID NO: 50.

[0471] In some embodiments, the anti-TCRβV antibody molecule, e.g., anti-TCRβ V6 (e.g., anti-TCRβ V6-5*01) antibody molecule comprises a VH and/or a VL of an antibody described in Table 1, or a sequence with at least 80%, 85%, 90%, 95%, 96%, 97%, 98%, 99% or more identity thereto.

[0472] In some embodiments, the anti-TCRβV antibody molecule, e.g., anti-TCRβ V6 (e.g., anti-TCRβ V6-5*01) antibody molecule comprises a VH and a VL of an antibody described in Table 1, or a sequence with at least 80%, 85%, 90%, 95%, 96%, 97%, 98%, 99% or more identity thereto.

[0473] In some embodiments, an anti-TCRVb antibody as described herein has an antigen binding domain having a VL having a consensus sequence of SEQ ID NO: 230, wherein position 30 is G, E, A or D; position 31 is N or D; position 32 is R or K; position 36 is Y or H; and/or position 56 is K or S.

[0474] In some embodiments, an anti-TCRVb antibody as described herein has an antigen binding domain having a VH having a consensus sequence of SEQ ID NO: 231, wherein: position 27 is H or T or G or Y; position 28 is D or T or S; position 30 is H or R or D or K or T; position 31 is L or D or K or T or N; position 32 is W or F or T or I or Y or G; position 49 is R or W; position 50 is V or I or F; position 51 is F or S or Y; position 52 is A or P; position 56 is N or S; position 57 is T or V or Y or I; position 58 is K or R; position 97 is G or V; position 99 is Y or I; position 102 is Y or A; and/or position 103 is D or G.

### Anti-TCRβ V12 Antibodies

[0475] In one aspect, provided herein is an anti-TCRβV antibody molecule that binds to human TCRβ V12, e.g., a TCRβ V12 subfamily comprising: TCRβ V12-4*01, TCRβ V12-3*01 or TCRβ V12-5*01. In some embodiments the TCRβ V12 subfamily comprises TCRβ V12-4*01. In some embodiments the TCRβ V12 subfamily comprises TCRβ V12-3*01.

[0476] In some embodiments, the anti-TCRβV antibody molecule, e.g., anti-TCRβ V12 antibody molecule, is a non-murine antibody molecule, e.g., a human or humanized antibody molecule. In some embodiments, the anti-TCRβV antibody molecule, e.g., anti-TCRβ V12 antibody molecule is a human antibody molecule. In some embodiments, the anti-TCRβV antibody molecule, e.g., anti-TCRβ V12 antibody molecule is a humanized antibody molecule.

[0477] In some embodiments, the anti-TCRβV antibody molecule, e.g., anti-TCRβ V12 antibody molecule, is isolated or recombinant.

[0478] In some embodiments, the anti-TCRβV antibody molecule, e.g., anti-TCRβ V12 antibody molecule, comprises at least one antigen-binding region, e.g., a variable region or an antigen-binding fragment thereof, from an antibody described herein, e.g., an antibody described in Table 2, or encoded by a nucleotide sequence in Table 2, or a sequence substantially identical (e.g., at least 80%, 85%, 90%, 92%, 95%, 97%, 98%, 99% or higher identical) to any of the aforesaid sequences.

[0479] In some embodiments, the anti-TCRβV antibody molecule, e.g., anti-TCRβ V12 antibody molecule, comprises at least one, two, three or four variable regions from an antibody described herein, e.g., an antibody as described in Table 2, or encoded by a nucleotide sequence in Table 2, or a sequence substantially identical (e.g., at least 80%, 85%, 90%, 92%, 95%, 97%, 98%, 99% or higher identical) to any of the aforesaid sequences.

[0480] In some embodiments, the anti-TCRβV antibody molecule, e.g., anti-TCRβ V12 antibody molecule, comprises at least one or two heavy chain variable regions from an antibody described herein, e.g., an antibody as described in Table 2, or encoded by a nucleotide sequence in Table 2, or a sequence substantially identical (e.g., at least 80%, 85%, 90%, 92%, 95%, 97%, 98%, 99% or higher identical) to any of the aforesaid sequences.

[0481] In some embodiments, the anti-TCRβV antibody molecule, e.g., anti-TCRβ V12 antibody molecule, comprises at least one or two light chain variable regions from an antibody described herein, e.g., an antibody as described in Table 2, or encoded by a nucleotide sequence in Table 2, or a sequence substantially identical (e.g., at least 80%, 85%, 90%, 92%, 95%, 97%, 98%, 99% or higher identical) to any of the aforesaid sequences.

[0482] In some embodiments, the anti-TCRβV antibody molecule, e.g., anti-TCRβ V12 antibody molecule, comprises a heavy chain constant region for an IgG4, e.g., a human IgG4. In still another embodiment, the anti-TCRβV antibody molecule, e.g., anti-TCRβ V12 antibody molecule, includes a heavy chain constant region for an IgG1, e.g., a human IgG1. In some embodiments, the heavy chain constant region comprises an amino sequence set forth in Table 3, or a sequence substantially identical (e.g., at least 80%, 85%, 90%, 92%, 95%, 97%, 98%, 99% or higher identical) thereto.

[0483] In some embodiments, the anti-TCRβV antibody molecule, e.g., anti-TCRβ V12 antibody molecule, includes a kappa light chain constant region, e.g., a human kappa light chain constant region. In some embodiments, the light chain constant region comprises an amino sequence set forth in Table 3, or a sequence substantially identical (e.g., at least 80%, 85%, 90%, 92%, 95%, 97%, 98%, 99% or higher identical) thereto.

[0484] In some embodiments, the anti-TCRβV antibody molecule, e.g., anti-TCRβ V12 antibody molecule, includes at least one, two, or three complementarity determining regions (CDRs) from a heavy chain variable region of an antibody described herein, e.g., an antibody as described in Table 2, or encoded by the nucleotide sequence in Table 2, or a sequence substantially identical (e.g., at least 80%, 85%, 90%, 92%, 95%, 97%, 98%, 99% or higher identical) to any of the aforesaid sequences.

[0485] In some embodiments, the anti-TCRβV antibody molecule, e.g., anti-TCRβ V12 antibody molecule, includes at least one, two, or three CDRs (or collectively all of the CDRs) from a heavy chain variable region comprising an amino acid sequence shown in Table 2, or encoded by a nucleotide sequence shown in Table 2. In some embodiments, one or more of the CDRs (or collectively all of the CDRs) have one, two, three, four, five, six or more changes, e.g., amino acid substitutions or deletions, relative to the amino acid sequence shown in Table 2, or encoded by a nucleotide sequence shown in Table 2.

[0486] In some embodiments, the anti-TCRβV antibody molecule, e.g., anti-TCRβ V12 antibody molecule, includes at least one, two, or three complementarity determining regions (CDRs) from a light chain variable region of an antibody described herein, e.g., an antibody as described in Table 2, or encoded by the nucleotide sequence in Table 2, or a sequence substantially identical (e.g., at least 80%, 85%, 90%, 92%, 95%, 97%, 98%, 99% or higher identical) to any of the aforesaid sequences.

[0487] In some embodiments, the anti-TCRβV antibody molecule, e.g., anti-TCRβ V12 antibody molecule, includes at least one, two, or three CDRs (or collectively all of the CDRs) from a light chain variable region comprising an amino acid sequence shown in Table 2, or encoded by a nucleotide sequence shown in Table 2. In some embodiments, one or more of the CDRs (or collectively all of the CDRs) have one, two, three, four, five, six or more changes, e.g., amino acid substitutions or deletions, relative to the amino acid sequence shown in Table 2, or encoded by a nucleotide sequence shown in Table 2.

[0488] In some embodiments, the anti-TCRβV antibody molecule, e.g., anti-TCRβ V12 antibody molecule, includes at least one, two, three, four, five or six CDRs (or collectively all of the CDRs) from a heavy and light chain variable region comprising an amino acid sequence shown in Table 2, or encoded by a nucleotide sequence shown in Table 2. In some embodiments, one or more of the CDRs (or collectively all of the CDRs) have one, two, three, four, five, six or more changes, e.g., amino acid substitutions or deletions, relative to the amino acid sequence shown in Table 2, or encoded by a nucleotide sequence shown in Table 2.

[0489] In some embodiments, the anti-TCRβV antibody molecule, e.g., anti-TCRβ V12 antibody molecule, molecule includes all six CDRs from an antibody described herein, e.g., an antibody as described in Table 2, or encoded by the nucleotide sequence in Table 2, or closely related CDRs, e.g., CDRs which are identical or which have at least one amino acid alteration, but not more than two, three or four alterations (e.g., substitutions, deletions, or insertions, e.g., conservative substitutions). In some embodiments, the anti-TCRβV antibody molecule, e.g., anti-TCRβ V12 antibody molecule, may include any CDR described herein.

[0490] In some embodiments, the anti-TCRβV antibody molecule, e.g., anti-TCRβ V12 antibody molecule includes at least one, two, or three CDRs according to Kabat et al. (e.g., at least one, two, or three CDRs according to the Kabat definition as set out in Table 2) from a heavy chain variable region of an antibody described herein, e.g., an antibody chosen as described in Table 2, or a sequence substantially identical (e.g., at least 80%, 85%, 90%, 92%, 95%, 97%, 98%, 99% or higher identical) to any of the aforesaid sequences; or which have at least one amino acid alteration, but not more than two, three or four alterations (e.g., substitutions, deletions, or insertions, e.g., conservative substitutions) relative to one, two, or three CDRs according to Kabat et al. shown in Table 2.

[0491] In some embodiments, the anti-TCRβV antibody molecule, e.g., anti-TCRβ V12 antibody molecule includes at least one, two, or three CDRs according to Kabat et al. (e.g., at least one, two, or three CDRs according to the Kabat definition as set out in Table 2) from a light chain variable region of an antibody described herein, e.g., an antibody as described in Table 2, or a sequence substantially identical (e.g., at least 80%, 85%, 90%, 92%, 95%, 97%, 98%, 99% or higher identical) to any of the aforesaid sequences; or which have at least one amino acid alteration, but not more than two, three or four alterations (e.g., substitutions, deletions, or insertions, e.g., conservative substitutions) relative to one, two, or three CDRs according to Kabat et al. shown in Table 2.

[0492] In some embodiments, the anti-TCRβV antibody molecule, e.g., anti-TCRβ V12 antibody molecule includes at least one, two, three, four, five, or six CDRs according to Kabat et al. (e.g., at least one, two, three, four, five, or six CDRs according to the Kabat definition as set out in Table 2) from the heavy and light chain variable regions of an antibody described herein, e.g., an antibody as described in Table 2, or encoded by the nucleotide sequence in Table 2; or a sequence substantially identical (e.g., at least 80%, 85%, 90%, 92%, 95%, 97%, 98%, 99% or higher identical) to any of the aforesaid sequences; or which have at least one amino acid alteration, but not more than two, three or four alterations (e.g., substitutions, deletions, or insertions, e.g., conservative substitutions) relative to one, two, three, four, five, or six CDRs according to Kabat et al. shown in Table 2.

[0493] In some embodiments, the anti-TCRβV antibody molecule, e.g., anti-TCRβ V12 antibody molecule includes all six CDRs according to Kabat et al. (e.g., all six CDRs according to the Kabat definition as set out in Table 2) from the heavy and light chain variable regions of an antibody described herein, e.g., an antibody as described in Table 2, or encoded by the nucleotide sequence in Table 2; or encoded by the nucleotide sequence in Table 2; or a sequence substantially identical (e.g., at least 80%, 85%, 90%, 92%, 95%, 97%, 98%, 99% or higher identical) to any of the aforesaid sequences; or which have at least one amino acid alteration, but not more than two, three or four alterations (e.g., substitutions, deletions, or insertions, e.g., conservative substitutions) relative to all six CDRs according to Kabat et al. shown in Table 2. In some embodiments, the anti-TCRβV antibody molecule, e.g., anti-TCRβ V12 antibody molecule may include any CDR described herein.

[0494] In some embodiments, the anti-TCRβV antibody molecule, e.g., anti-TCRβ V12 antibody molecule includes at least one, two, or three hypervariable loops that have the same canonical structures as the corresponding hypervariable loop of an antibody described herein, e.g., an antibody described in Table 2, e.g., the same canonical structures as at least loop 1 and/or loop 2 of the heavy and/or light chain variable domains of an antibody described herein. See, e.g., Chothia et al., (1992) J. Mol. Biol. 227:799-817; Tomlinson et al., (1992) J. Mol. Biol. 227:776-798 for descriptions of hypervariable loop canonical structures. These structures can be determined by inspection of the tables described in these references.

[0495] In some embodiments, the anti-TCRβV antibody molecule, e.g., anti-TCRβ V12 antibody molecule includes at least one, two, or three CDRs according to Chothia et al. (e.g., at least one, two, or three CDRs according to the Chothia definition as set out in Table 2) from a heavy chain variable region of an antibody described herein, e.g., an antibody chosen as described in Table 2, or a sequence substantially identical (e.g., at least 80%, 85%, 90%, 92%, 95%, 97%, 98%, 99% or higher identical) to any of the aforesaid sequences; or which have at least one amino acid alteration, but not more than two, three or four alterations (e.g., substitutions, deletions, or insertions, e.g., conservative substitutions) relative to one, two, or three CDRs according to Chothia et al. shown in Table 2.

[0496] In some embodiments, the anti-TCRβV antibody molecule, e.g., anti-TCRβ V12 antibody molecule includes at least one, two, or three CDRs according to Chothia et al. (e.g., at least one, two, or three CDRs according to the Chothia definition as set out in Table 2) from a light chain variable region of an antibody described herein, e.g., an antibody as described in Table 2, or a sequence substantially identical (e.g., at least 80%, 85%, 90%, 92%, 95%, 97%, 98%, 99% or higher identical) to any of the aforesaid sequences; or which have at least one amino acid alteration, but not more than two, three or four alterations (e.g., substitutions, deletions, or insertions, e.g., conservative substitutions) relative to one, two, or three CDRs according to Chothia et al. shown in Table 2.

[0497] In some embodiments, the anti-TCRβV antibody molecule, e.g., anti-TCRβ V12 antibody molecule includes at least one, two, three, four, five, or six CDRs according to Chothia et al. (e.g., at least one, two, three, four, five, or six CDRs according to the Chothia definition as set out in Table 2) from the heavy and light chain variable regions of an antibody described herein, e.g., an antibody as described in Table 2, or encoded by the nucleotide sequence in Table 2; or a sequence substantially identical (e.g., at least 80%, 85%, 90%, 92%, 95%, 97%, 98%, 99% or higher identical) to any of the aforesaid sequences; or which have at least one amino acid alteration, but not more than two, three or four alterations (e.g., substitutions, deletions, or insertions, e.g., conservative substitutions) relative to one, two, three, four, five, or six CDRs according to Chothia et al. shown in Table 2.

[0498] In some embodiments, the anti-TCRβV antibody molecule, e.g., anti-TCRβ V12 antibody molecule includes all six CDRs according to Chothia et al. (e.g., all six CDRs according to the Chothia definition as set out in Table 2) from the heavy and light chain variable regions of an antibody described herein, e.g., an antibody as described in Table 2, or encoded by the nucleotide sequence in Table 2; or encoded by the nucleotide sequence in Table 2; or a sequence substantially identical (e.g., at least 80%, 85%, 90%, 92%, 95%, 97%, 98%, 99% or higher identical) to any of the aforesaid sequences; or which have at least one amino acid alteration, but not more than two, three or four alterations (e.g., substitutions, deletions, or insertions, e.g., conservative substitutions) relative to all six CDRs according to Chothia et al. shown in Table 2. In some embodiments, the anti-TCRβV antibody molecule, e.g., anti-TCRβ V12 antibody molecule may include any CDR described herein.

[0499] In some embodiments, the anti-TCRβV antibody molecule, e.g., anti-TCRβ V12 antibody molecule includes at least one, two, or three CDRs according to a combined CDR (e.g., at least one, two, or three CDRs according to the combined CDR definition as set out in Table 2) from a heavy chain variable region of an antibody described herein, e.g., an antibody chosen as described in Table 2, or a sequence substantially identical (e.g., at least 80%, 85%, 90%, 92%, 95%, 97%, 98%, 99% or higher identical) to any of the aforesaid sequences; or which have at least one amino acid alteration, but not more than two, three or four alterations (e.g., substitutions, deletions, or insertions, e.g., conservative substitutions) relative to one, two, or three CDRs according to combined CDR shown in Table 2.

[0500] In some embodiments, the anti-TCRβV antibody molecule, e.g., anti-TCRβ V12 antibody molecule includes at least one, two, or three CDRs according to a combined CDR (e.g., at least one, two, or three CDRs according to the combined CDR definition as set out in Table 2) from a light chain variable region of an antibody described herein, e.g., an antibody as described in Table 2, or a sequence substantially identical (e.g., at least 80%, 85%, 90%, 92%, 95%, 97%, 98%, 99% or higher identical) to any of the aforesaid sequences; or which have at least one amino acid alteration, but not more than two, three or four alterations (e.g., substitutions, deletions, or insertions, e.g., conservative substitutions) relative to one, two, or three CDRs according to a combined CDR shown in Table 2.

[0501] In some embodiments, the anti-TCRβV antibody molecule, e.g., anti-TCRβ V12 antibody molecule includes at least one, two, three, four, five, or six CDRs according to a combined CDR. (e.g., at least one, two, three, four, five, or six CDRs according to the combined CDR definition as set out in Table 2) from the heavy and light chain variable regions of an antibody described herein, e.g., an antibody as described in Table 2, or encoded by the nucleotide sequence in Table 2; or a sequence substantially identical (e.g., at least 80%, 85%, 90%, 92%, 95%, 97%, 98%, 99% or higher identical) to any of the aforesaid sequences; or which have at least one amino acid alteration, but not more than two, three or four alterations (e.g., substitutions, deletions, or insertions, e.g., conservative substitutions) relative to one, two, three, four, five, or six CDRs according to a combined CDR shown in Table 2.

[0502] In some embodiments, the anti-TCRβV antibody molecule, e.g., anti-TCRβ V12 antibody molecule includes all six CDRs according to a combined CDR (e.g., all six CDRs according to the combined CDR definition as set out in Table 2) from the heavy and light chain variable regions of an antibody described herein, e.g., an antibody as described in Table 2, or encoded by the nucleotide sequence in Table 2; or encoded by the nucleotide sequence in Table 2; or a sequence substantially identical (e.g., at least 80%, 85%, 90%, 92%, 95%, 97%, 98%, 99% or higher identical) to any of the aforesaid sequences; or which have at least one amino acid alteration, but not more than two, three or four alterations (e.g., substitutions, deletions, or insertions, e.g., conservative substitutions) relative to all six CDRs according to a combined CDR shown in Table 2. In some embodiments, the anti-TCRβV antibody molecule, e.g., anti-TCRβ V12 antibody molecule may include any CDR described herein.

[0503] In some embodiments, a combined CDR as set out in Table 1 is a CDR that comprises a Kabat CDR and a Chothia CDR.

[0504] In some embodiments, the anti-TCRβV antibody molecule, e e.g., anti-TCRβ V12 antibody molecule, molecule includes a combination of CDRs or hypervariable loops identified as combined CDRs in Table 1. In some embodiments, the anti-TCRβV antibody molecule, e.g., anti-TCRβ V12 antibody molecule, can contain any combination of CDRs or hypervariable loops according the “combined” CDRs are described in Table 1.

[0505] In some embodiments, the anti-TCRβV antibody molecule, e.g., anti-TCRβ V12 antibody molecule includes a combination of CDRs or hypervariable loops defined according to the Kabat et al. and Chothia et al., or as described in Table 1.

[0506] In some embodiments, the anti-TCRβV antibody molecule, e.g., anti-TCRβ V12 antibody molecule can contain any combination of CDRs or hypervariable loops according to the Kabat and Chothia definitions.

[0507] In some embodiments, e.g., an embodiment comprising a variable region, a CDR (e.g., a combined CDR, Chothia CDR or Kabat CDR), or other sequence referred to herein, e.g., in Table 2, the antibody molecule is a monospecific antibody molecule, a bispecific antibody molecule, a bivalent antibody molecule, a biparatopic antibody molecule, or an antibody molecule that comprises an antigen binding fragment of an antibody, e.g., a half antibody or antigen binding fragment of a half antibody. In certain embodiments the antibody molecule comprises a multispecific molecule, e.g., a bispecific molecule, e.g., as described herein.

[0508] In some embodiments, the anti-TCRβV antibody molecule, e.g., anti-TCRβ V12 antibody molecule includes: (i) one, two or all of a light chain complementarity determining region 1 (LC CDR1), a light chain complementarity determining region 2 (LC CDR2), and a light chain complementarity determining region 3 (LC CDR3) of SEQ ID NO: 16, SEQ ID NO: 26, SEQ ID NO: 27, SEQ ID NO: 28, SEQ ID NO: 29 or SEQ ID NO: 30, and/or (ii) one, two or all of a heavy chain complementarity determining region 1 (HC CDR1), heavy chain complementarity determining region 2 (HC CDR2), and a heavy chain complementarity determining region 3 (HC CDR3) of SEQ ID NO: 15, SEQ ID NO: 23, SEQ ID NO: 24 or SEQ ID NO: 25.

[0509] In some embodiments, the anti-TCRβV antibody molecule, e.g., anti-TCRβ V12 antibody molecule comprises: (i) a LC CDR1 amino acid sequence of SEQ ID NO: 20, a LC CDR2 amino acid sequence of SEQ ID NO: 21, or a LC CDR3 amino acid sequence of SEQ ID NO: 22; and/or (ii) a HC CDR1 amino acid sequence of SEQ ID NO: 17, a HC CDR2 amino acid sequence of SEQ ID NO: 18, or a HC CDR3 amino acid sequence of SEQ ID NO: 19.

[0510] In some embodiments, the anti-TCRβV antibody molecule, e.g., anti-TCRβ V12 antibody molecule comprises: (i) a light chain variable region (VL) comprising a LC CDR1 amino acid sequence of SEQ ID NO: 20, a LC CDR2 amino acid sequence of SEQ ID NO: 21, and a LC CDR3 amino acid sequence of SEQ ID NO: 2; and/or (ii) a heavy chain variable region (VH) comprising a HC CDR1 amino acid sequence of SEQ ID NO: 17, a HC CDR2 amino acid sequence of SEQ ID NO: 18, and a HC CDR3 amino acid sequence of SEQ ID NO: 19.

[0511] In some embodiments, the anti-TCRβV antibody molecule, e.g., anti-TCRβ V12 antibody molecule comprises: (i) a LC CDR1 amino acid sequence of SEQ ID NO: 63, a LC CDR2 amino acid sequence of SEQ ID NO: 64, or a LC CDR3 amino acid sequence of SEQ ID NO: 65; and/or (ii) a HC CDR1 amino acid sequence of SEQ ID NO: 57, a HC CDR2 amino acid sequence of SEQ ID NO: 58, or a HC CDR3 amino acid sequence of SEQ ID NO: 59.

[0512] In some embodiments, the anti-TCRβV antibody molecule, e.g., anti-TCRβ V12 antibody molecule comprises: (i) a light chain variable region (VL) comprising a LC CDR1 amino acid sequence of SEQ ID NO: 63, a LC CDR2 amino acid sequence of SEQ ID NO: 64, or a LC CDR3 amino acid sequence of SEQ ID NO: 65; and/or (ii) a heavy chain variable region (VH) comprising a HC CDR1 amino acid sequence of SEQ ID NO: 57, a HC CDR2 amino acid sequence of SEQ ID NO: 58, or a HC CDR3 amino acid sequence of SEQ ID NO: 59.

[0513] In some embodiments, the anti-TCRβV antibody molecule, e.g., anti-TCRβ V12 antibody molecule comprises: (i) a LC CDR1 amino acid sequence of SEQ ID NO: 66, a LC CDR2 amino acid sequence of SEQ ID NO: 67, or a LC CDR3 amino acid sequence of SEQ ID NO: 68; and/or (ii) a HC CDR1 amino acid sequence of SEQ ID NO: 60, a HC CDR2 amino acid sequence of SEQ ID NO: 61, or a HC CDR3 amino acid sequence of SEQ ID NO: 62.

[0514] In some embodiments, the anti-TCRβV antibody molecule, e.g., anti-TCRβ V12 antibody molecule comprises: (i) a light chain variable region (VL) comprising a LC CDR1 amino acid sequence of SEQ ID NO: 63, a LC CDR2 amino acid sequence of SEQ ID NO: 64, or a LC CDR3 amino acid sequence of SEQ ID NO: 65; and/or (ii) a heavy chain variable region (VH) comprising a HC CDR1 amino acid sequence of SEQ ID NO: 57, a HC CDR2 amino acid sequence of SEQ ID NO: 58, or a HC CDR3 amino acid sequence of SEQ ID NO: 59.

[0515] In some embodiments, the light or the heavy chain variable framework (e.g., the region encompassing at least FR1, FR2, FR3, and optionally FR4) of the anti-TCRβV antibody molecule, e.g., anti-TCRβ V12 antibody molecule can be chosen from: (a) a light or heavy chain variable framework including at least 80%, 85%, 87% 90%, 92%, 93%, 95%, 97%, 98%, or 100% of the amino acid residues from a human light or heavy chain variable framework, e.g., a light or heavy chain variable framework residue from a human mature antibody, a human germline sequence, or a human consensus sequence; (b) a light or heavy chain variable framework including from 20% to 80%, 40% to 60%, 60% to 90%, or 70% to 95% of the amino acid residues from a human light or heavy chain variable framework, e.g., a light or heavy chain variable framework residue from a human mature antibody, a human germline sequence, or a human consensus sequence; (c) a non-human framework (e.g., a rodent framework); or (d) a non-human framework that has been modified, e.g., to remove antigenic or cytotoxic determinants, e.g., deimmunized, or partially humanized. In some embodiments, the light or heavy chain variable framework region (particularly FR1, FR2 and/or FR3) includes a light or heavy chain variable framework sequence at least 70, 75, 80, 85, 87, 88, 90, 92, 94, 95, 96, 97, 98, 99% identical or identical to the frameworks of a VL or VH segment of a human germline gene.

[0516] In some embodiments, the anti-TCRβV antibody molecule, e.g., anti-TCRβ V12 antibody molecule, comprises a heavy chain variable domain having at least one, two, three, four, five, six, seven, ten, fifteen, twenty or more changes, e.g., amino acid substitutions or deletions, from an amino acid sequence described in Table 2.e.g., the amino acid sequence of the FR region in the entire variable region, e.g., shown in FIGS. 3A and 3B, or in SEQ ID NOs: 23-25.

[0517] Alternatively, or in combination with the heavy chain substitutions described herein the anti-TCRβV antibody molecule, e.g., anti-TCRβ V12 antibody molecule comprises a light chain variable domain having at least one, two, three, four, five, six, seven, ten, fifteen, twenty or more amino acid changes, e.g., amino acid substitutions or deletions, from an amino acid sequence of an antibody described herein. e.g., the amino acid sequence of the FR region in the entire variable region, e.g., shown in FIGS. 3A and 3B, or in SEQ ID NOs: 26-30.

[0518] In some embodiments, the anti-TCRβV antibody molecule, e.g., anti-TCRβ V12 antibody molecule includes one, two, three, or four heavy chain framework regions shown in FIG. 3A, or a sequence substantially identical thereto.

[0519] In some embodiments, the anti-TCRβV antibody molecule, e.g., anti-TCRβ V12 antibody molecule includes one, two, three, or four light chain framework regions shown in FIG. 3B, or a sequence substantially identical thereto. In some embodiments, the anti-TCRβV antibody molecule, e.g., anti-TCRβ V12 antibody molecule comprises the light chain framework region 1 e.g., as shown in FIG. 3B. In some embodiments, the anti-TCRβV antibody molecule, e.g., anti-TCRβ V12 antibody molecule comprises the light chain framework region 2 e.g., as shown in FIG. 3B. In some embodiments, the anti-TCRβV antibody molecule, e.g., anti-TCRβ V12 antibody molecule comprises the light chain framework region 3, e.g., as shown in FIG. 3B. In some embodiments, the anti-TCRβV antibody molecule, e.g., anti-TCRβ V12 antibody molecule comprises the light chain framework region 4, e.g., as shown in FIG. 3B.

[0520] In some embodiments, the anti-TCRβV antibody molecule, e.g., anti-TCRβ V12 antibody molecule comprises a light chain comprising a framework region, e.g., framework region 1 (FR1), comprising a change, e.g., a substitution (e.g., a conservative substitution) at one or more, e.g., all, position as described herein according to Kabat numbering. In some embodiments, FR1 comprises an Aspartic Acid at position 1, e.g., a substitution at position 1 according to Kabat numbering, e.g., an Alanine to Aspartic Acid substitution. In some embodiments, FR1 comprises an Asparagine at position 2, e.g., a substitution at position 2 according to Kabat numbering, e.g., an Isoleucine to Asparagine substitution, Serine to Asparagine substitution or Tyrosine to Asparagine substitution. In some embodiments, FR1 comprises a Leucine at position 4, e.g., a substitution at position 4 according to Kabat numbering, e.g., a Methionine to Leucine substitution.

[0521] In some embodiments, the anti-TCRβV antibody molecule, e.g., anti-TCRβ V12 antibody molecule comprises a light chain comprising a framework region, e.g., framework region 1 (FR1), comprising a substitution at position 1 according to Kabat numbering, e.g., an Alanine to Aspartic Acid substitution, a substitution at position 2 according to Kabat numbering, e.g., an Isoleucine to Asparagine substitution, Serine to Asparagine substitution or Tyrosine to Asparagine substitution, and a substitution at position 4 according to Kabat numbering, e.g., a Methionine to Leucine substitution. In some embodiments, the anti-TCRβV antibody molecule, e.g., anti-TCRβ V12 antibody molecule comprises a light chain comprising a framework region, e.g., framework region 1 (FR1), comprising a substitution at position 1 according to Kabat numbering, e.g., an Alanine to Aspartic Acid substitution, and a substitution at position 2 according to Kabat numbering, e.g., an Isoleucine to Asparagine substitution, Serine to Asparagine substitution or Tyrosine to Asparagine substitution. In some embodiments, the anti-TCRβV antibody molecule, e.g., anti-TCRβ V12 antibody molecule comprises a light chain comprising a framework region, e.g., framework region 1 (FR1), comprising a substitution at position 1 according to Kabat numbering, e.g., an Alanine to Aspartic Acid substitution, and a substitution at position 4 according to Kabat numbering, e.g., a Methionine to Leucine substitution. In some embodiments, the anti-TCRβV antibody molecule, e.g., anti-TCRβ V12 antibody molecule comprises a light chain comprising a framework region, e.g., framework region 1 (FR1), comprising a substitution at position 2 according to Kabat numbering, e.g., an Isoleucine to Asparagine substitution, Serine to Asparagine substitution or Tyrosine to Asparagine substitution, and a substitution at position 4 according to Kabat numbering, e.g., a Methionine to Leucine substitution. In some embodiments, the substitution is relative to a human germline light chain framework region sequence.

[0522] In some embodiments, the anti-TCRβV antibody molecule, e.g., anti-TCRβ V12 antibody molecule comprises a light chain comprising a framework region, e.g., framework region 3 (FR3), comprising a change, e.g., a substitution (e.g., a conservative substitution) at one or more, e.g., all, position as described herein according to Kabat numbering. In some embodiments, FR3 comprises a Glycine at position 66, e.g., a substitution at position 66 according to Kabat numbering, e.g., a Lysine to Glycine substitution, or a Serine to Glycine substitution. In some embodiments, FR3 comprises an Asparagine at position 69, e.g., a substitution at position 69 according to Kabat numbering, e.g., a Tyrosine to Asparagine substitution. In some embodiments, FR3 comprises a Tyrosine at position 71, e.g., a substitution at position 71 according to Kabat numbering, e.g., a Phenylalanine to Tyrosine substitution, or an Alanine to Tyrosine substitution.

[0523] In some embodiments, the anti-TCRβV antibody molecule, e.g., anti-TCRβ V12 antibody molecule comprises a light chain comprising a framework region, e.g., framework region 3 (FR3), comprising a substitution at position 66 according to Kabat numbering, e.g., a Lysine to Glycine substitution, or a Serine to Glycine substitution, and a substitution at position 69 according to Kabat numbering, e.g., a Tyrosine to Asparagine substitution. In some embodiments, the anti-TCRβV antibody molecule, e.g., anti-TCRβ V12 antibody molecule comprises a light chain comprising a framework region, e.g., framework region 3 (FR3), comprising a substitution at position 66 according to Kabat numbering, e.g., Lysine to Glycine substitution, or a Serine to Glycine substitution, and a substitution at position 71 according to Kabat numbering, e.g., a Phenylalanine to Tyrosine substitution, or an Alanine to Tyrosine substitution. In some embodiments, the anti-TCRβV antibody molecule, e.g., anti-TCRβ V12 antibody molecule comprises a light chain comprising a framework region, e.g., framework region 3 (FR3), comprising a substitution at position 69 according to Kabat numbering, e.g., a Tyrosine to Asparagine substitution and a substitution at position 71 according to Kabat numbering, e.g., a Phenylalanine to Tyrosine substitution, or an Alanine to Tyrosine substitution. In some embodiments, the anti-TCRβV antibody molecule, e.g., anti-TCRβ V12 antibody molecule comprises a light chain comprising a framework region, e.g., framework region 3 (FR3), comprising a substitution at position 66 according to Kabat numbering, e.g., a Lysine to Glycine substitution, or a Serine to Glycine substitution, a substitution at position 69 according to Kabat numbering, e.g., a Tyrosine to Asparagine substitution and a substitution at position 71 according to Kabat numbering, e.g., a Phenylalanine to Tyrosine substitution, or an Alanine to Tyrosine substitution. In some embodiments, the substitution is relative to a human germline light chain framework region sequence.

[0524] In some embodiments, the anti-TCRβV antibody molecule, e.g., anti-TCRβ V12 antibody molecule comprises a light chain comprising: a framework region 1 (FR1) comprising a substitution at position 2 according to Kabat numbering, e.g., a Isoleucine to Asparagine substitution; and a framework region 3 (FR3), comprising a substitution at position 69 according to Kabat numbering, e.g., a Threonine to Asparagine substitution and a substitution at position 71 according to Kabat numbering, e.g., a Phenylalanine to Tyrosine substitution, e.g., as shown in the amino acid sequence of SEQ ID NO: 26. In some embodiments, the substitution is relative to a human germline light chain framework region sequence.

[0525] In some embodiments, the anti-TCRβV antibody molecule, e.g., anti-TCRβ V12 antibody molecule comprises a light chain comprising: (a) a framework region 1 (FR1) comprising a substitution at position 1 according to Kabat numbering, e.g., a Alanine to Aspartic Acid substitution, and a substitution at position 2 according to Kabat numbering, e.g., a Isoleucine to Asparagine substitution; and (b) a framework region 3 (FR3), comprising a substitution at position 69 according to Kabat numbering, e.g., a Threonine to Asparagine substitution and a substitution at position 71 according to Kabat numbering, e.g., a Phenylalanine to Tyrosine substitution, e.g., as shown in the amino acid sequence of SEQ ID NO: 27 In some embodiments, the substitution is relative to a human germline light chain framework region sequence.

[0526] In some embodiments, the anti-TCRβV antibody molecule, e.g., anti-TCRβ V12 antibody molecule comprises a light chain comprising: (a) a framework region 1 (FR1) comprising a substitution at position 2 according to Kabat numbering, e.g., a Serine to Asparagine substitution; and a substitution at position 4 according to Kabat numbering, e.g., a Methionine to Leucine substitution; and (b) a framework region 3 (FR3), comprising a substitution at position 69 according to Kabat numbering, e.g., a Threonine to Asparagine substitution and a substitution at position 71 according to Kabat numbering, e.g., a Phenylalanine to Tyrosine substitution, e.g., as shown in the amino acid sequence of SEQ ID NO: 28 In some embodiments, the substitution is relative to a human germline light chain framework region sequence.

[0527] In some embodiments, the anti-TCRβV antibody molecule, e.g., anti-TCRβ V12 antibody molecule comprises a light chain comprising: (a) a framework region 1 (FR1) comprising a substitution at position 2 according to Kabat numbering, e.g., a Serine to Asparagine substitution; and (b) a framework region 3 (FR3) comprising a substitution at position 66 according to Kabat numbering, e.g., a Lysine to Glycine substitution; a substitution at position 69 according to Kabat numbering, e.g., a Threonine to Asparagine substitution; and a substitution at position 71 according to Kabat numbering, e.g., a Alanine to Tyrosine substitution, e.g., as shown in the amino acid sequence of SEQ ID NO: 29. In some embodiments, the substitution is relative to a human germline light chain framework region sequence.

[0528] In some embodiments, the anti-TCRβV antibody molecule, e.g., anti-TCRβ V12 antibody molecule comprises a light chain comprising: (a) a framework region 1 (FR1) comprising a substitution at position 2 according to Kabat numbering, e.g., a Tyrosine to Asparagine substitution; and (b) a framework region 3 (FR3) comprising a substitution at position 66 according to Kabat numbering, e.g., a Serine to Glycine substitution; a substitution at position 69 according to Kabat numbering, e.g., a Threonine to Asparagine substitution; and a substitution at position 71 according to Kabat numbering, e.g., a Alanine to Tyrosine substitution, e.g., as shown in the amino acid sequence of SEQ ID NO: 29. In some embodiments, the substitution is relative to a human germline light chain framework region sequence.

[0529] In some embodiments, the anti-TCRβV antibody molecule, e.g., anti-TCRβ V12 antibody molecule comprises a light chain variable domain comprising: (a) a framework region 1 (FR1) comprising a change, e.g., a substitution (e.g., a conservative substitution) at one or more (e.g., all) positions as described herein according to Kabat numbering, and (b) a framework region 3 (FR3) comprising a change, e.g., a substitution (e.g., a conservative substitution) at one or more (e.g., all) position as described herein according to Kabat numbering. In some embodiments, the substitution is relative to a human germline light chain framework region sequence.

[0530] In some embodiments, the anti-TCRβV antibody molecule, e.g., anti-TCRβ V12 antibody molecule comprises the heavy chain framework region 1, e.g., as shown in FIG. 3A. In some embodiments, the anti-TCRβV antibody molecule, e.g., anti-TCRβ V12 antibody molecule comprises the heavy chain framework region 2, e.g., as shown in FIG. 3A. In some embodiments, the anti-TCRβV antibody molecule, e.g., anti-TCRβ V12 antibody molecule comprises the heavy chain framework region 3, e.g., as shown in FIG. 3A. In some embodiments, the anti-TCRβV antibody molecule, e.g., anti-TCRβ V12 antibody molecule comprises the heavy chain framework region 4, e.g., as shown in FIG. 3A. In some embodiments, the anti-TCRβV antibody molecule, e.g., anti-TCRβ V12 antibody molecule comprises the heavy chain framework regions 1-4, e.g., SEQ ID NOS: 20-23, or as shown in FIG. 3A. In some embodiments, the anti-TCRβV antibody molecule, e.g., anti-TCRβ V12 antibody molecule comprises the light chain framework regions 1-4, e.g., SEQ ID NOs: 26-30, or as shown in FIG. 3B.

[0531] In some embodiments, the anti-TCRβV antibody molecule, e.g., anti-TCRβ V12 antibody molecule comprises the heavy chain framework regions 1-4, e.g., SEQ ID NOs: 23-25; and the light chain framework regions 1-4, e.g., SEQ ID NOs: 26-30, or as shown in FIGS. 3A and 3B.

[0532] In some embodiments, the heavy or light chain variable domain, or both, of, the anti-TCRβV antibody molecule, e.g., anti-TCRβ V12 antibody molecule includes an amino acid sequence, which is substantially identical to an amino acid as described herein, e.g., at least 80%, 85%, 90%, 92%, 95%, 97%, 98%, 99% or higher identical to a variable region of an antibody described herein, e.g., an antibody as described in Table 2, or encoded by the nucleotide sequence in Table 2; or which differs at least 1 or 5 residues, but less than 40, 30, 20, or 10 residues, from a variable region of an antibody described herein.

[0533] In some embodiments, the anti-TCRβV antibody molecule, e.g., anti-TCRβ V12 antibody molecule comprises at least one, two, three, or four antigen-binding regions, e.g., variable regions, having an amino acid sequence as set forth in Table 2, or a sequence substantially identical thereto (e.g., a sequence at least about 85%, 90%, 95%, 99% or more identical thereto, or which differs by no more than 1, 2, 5, 10, or 15 amino acid residues from the sequences shown in Table 2. In another embodiment, the anti-TCRβV antibody molecule, e.g., anti-TCRβ V12 antibody molecule includes a VH and/or VL domain encoded by a nucleic acid having a nucleotide sequence as set forth in Table 2, or a sequence substantially identical thereto (e.g., a sequence at least about 85%, 90%, 95%, 99% or more identical thereto, or which differs by no more than 3, 6, 15, 30, or 45 nucleotides from the sequences shown in Table 2.

[0534] In some embodiments, the anti-TCRβV antibody molecule, e.g., anti-TCRβ V12 antibody molecule comprises: a VH domain comprising an amino acid sequence chosen from the amino acid sequence of SEQ ID NO: 23, SEQ ID NO:24 or SEQ ID NO:25, an amino acid sequence at least about 85%, 90%, 95%, 99% or more identical to the amino acid sequence SEQ ID NO: 23, SEQ ID NO:24 or SEQ ID NO:25, or an amino acid sequence which differs by no more than 1, 2, 5, 10, or 15 amino acid residues from the amino acid sequence of SEQ ID NO: 23, SEQ ID NO:24 or SEQ ID NO:25; and/or a VL domain comprising an amino acid sequence chosen from the amino acid sequence of SEQ ID NO: 26, SEQ ID NO: 27, SEQ ID NO: 28, SEQ ID NO: 29 or SEQ ID NO: 30, an amino acid sequence at least about 85%, 90%, 95%, 99% or more identical to the amino acid sequence of SEQ ID NO: 26, SEQ ID NO: 27, SEQ ID NO: 28, SEQ ID NO: 29 or SEQ ID NO: 30, or an amino acid sequence which differs by no more than 1, 2, 5, 10, or 15 amino acid residues from the amino acid sequence of SEQ ID NO: 26, SEQ ID NO: 27, SEQ ID NO: 28, SEQ ID NO: 29 or SEQ ID NO: 30. In some embodiments, the anti-TCRβV antibody molecule, e.g., anti-TCRβ V12 antibody molecule comprises: a VH domain comprising the amino acid sequence of SEQ ID NO: 23, an amino acid sequence at least about 85%, 90%, 95%, 99% or more identical to the amino acid sequence SEQ ID NO: 23, or an amino acid sequence which differs by no more than 1, 2, 5, 10, or 15 amino acid residues from the amino acid sequence of SEQ ID NO: 23; and a VL domain comprising the amino acid sequence of SEQ ID NO: 26, an amino acid sequence at least about 85%, 90%, 95%, 99% or more identical to the amino acid sequence SEQ ID NO: 26, or an amino acid sequence which differs by no more than 1, 2, 5, 10, or 15 amino acid residues from the amino acid sequence of SEQ ID NO: 26.

[0535] In some embodiments, the anti-TCRβV antibody molecule, e.g., anti-TCRβ V12 antibody molecule comprises: a VH domain comprising the amino acid sequence of SEQ ID NO: 23, an amino acid sequence at least about 85%, 90%, 95%, 99% or more identical to the amino acid sequence SEQ ID NO: 23, or an amino acid sequence which differs by no more than 1, 2, 5, 10, or 15 amino acid residues from the amino acid sequence of SEQ ID NO: 23; and a VL domain comprising the amino acid sequence of SEQ ID NO: 27, an amino acid sequence at least about 85%, 90%, 95%, 99% or more identical to the amino acid sequence SEQ ID NO: 27, or an amino acid sequence which differs by no more than 1, 2, 5, 10, or 15 amino acid residues from the amino acid sequence of SEQ ID NO: 27.

[0536] In some embodiments, the anti-TCRβV antibody molecule, e.g., anti-TCRβ V12 antibody molecule comprises: a VH domain comprising the amino acid sequence of SEQ ID NO: 23, an amino acid sequence at least about 85%, 90%, 95%, 99% or more identical to the amino acid sequence SEQ ID NO: 23, or an amino acid sequence which differs by no more than 1, 2, 5, 10, or 15 amino acid residues from the amino acid sequence of SEQ ID NO: 23; and a VL domain comprising the amino acid sequence of SEQ ID NO: 28, an amino acid sequence at least about 85%, 90%, 95%, 99% or more identical to the amino acid sequence SEQ ID NO: 28, or an amino acid sequence which differs by no more than 1, 2, 5, 10, or 15 amino acid residues from the amino acid sequence of SEQ ID NO: 28.

[0537] In some embodiments, the anti-TCRβV antibody molecule, e.g., anti-TCRβ V12 antibody molecule comprises: a VH domain comprising the amino acid sequence of SEQ ID NO: 23, an amino acid sequence at least about 85%, 90%, 95%, 99% or more identical to the amino acid sequence SEQ ID NO: 23, or an amino acid sequence which differs by no more than 1, 2, 5, 10, or 15 amino acid residues from the amino acid sequence of SEQ ID NO: 23; and a VL domain comprising the amino acid sequence of SEQ ID NO: 29, an amino acid sequence at least about 85%, 90%, 95%, 99% or more identical to the amino acid sequence SEQ ID NO: 29, or an amino acid sequence which differs by no more than 1, 2, 5, 10, or 15 amino acid residues from the amino acid sequence of SEQ ID NO: 29.

[0538] In some embodiments, the anti-TCRβV antibody molecule, e.g., anti-TCRβ V12 antibody molecule comprises: a VH domain comprising the amino acid sequence of SEQ ID NO: 23, an amino acid sequence at least about 85%, 90%, 95%, 99% or more identical to the amino acid sequence SEQ ID NO: 23, or an amino acid sequence which differs by no more than 1, 2, 5, 10, or 15 amino acid residues from the amino acid sequence of SEQ ID NO: 23; and a VL domain comprising the amino acid sequence of SEQ ID NO: 30, an amino acid sequence at least about 85%, 90%, 95%, 99% or more identical to the amino acid sequence SEQ ID NO: 30, or an amino acid sequence which differs by no more than 1, 2, 5, 10, or 15 amino acid residues from the amino acid sequence of SEQ ID NO: 30.

[0539] In some embodiments, the anti-TCRβV antibody molecule, e.g., anti-TCRβ V12 antibody molecule comprises: a VH domain comprising the amino acid sequence of SEQ ID NO: 24 or 25, an amino acid sequence at least about 85%, 90%, 95%, 99% or more identical to the amino acid sequence SEQ ID NO: 24 or 25, or an amino acid sequence which differs by no more than 1, 2, 5, 10, or 15 amino acid residues from the amino acid sequence of SEQ ID NO: 24 or 25; and a VL domain comprising the amino acid sequence of SEQ ID NO: 26, an amino acid sequence at least about 85%, 90%, 95%, 99% or more identical to the amino acid sequence SEQ ID NO: 26, or an amino acid sequence which differs by no more than 1, 2, 5, 10, or 15 amino acid residues from the amino acid sequence of SEQ ID NO: 26.

[0540] In some embodiments, the anti-TCRβV antibody molecule, e.g., anti-TCRβ V12 antibody molecule comprises: a VH domain comprising the amino acid sequence of SEQ ID NO: 24 or 25, an amino acid sequence at least about 85%, 90%, 95%, 99% or more identical to the amino acid sequence SEQ ID NO: 24 or 25, or an amino acid sequence which differs by no more than 1, 2, 5, 10, or 15 amino acid residues from the amino acid sequence of SEQ ID NO: 24 or 25; and a VL domain comprising the amino acid sequence of SEQ ID NO: 27, an amino acid sequence at least about 85%, 90%, 95%, 99% or more identical to the amino acid sequence SEQ ID NO: 27, or an amino acid sequence which differs by no more than 1, 2, 5, 10, or 15 amino acid residues from the amino acid sequence of SEQ ID NO: 27.

[0541] In some embodiments, the anti-TCRβV antibody molecule, e.g., anti-TCRβ V12 antibody molecule comprises: a VH domain comprising the amino acid sequence of SEQ ID NO: 24 or 25, an amino acid sequence at least about 85%, 90%, 95%, 99% or more identical to the amino acid sequence SEQ ID NO: 24 or 25, or an amino acid sequence which differs by no more than 1, 2, 5, 10, or 15 amino acid residues from the amino acid sequence of SEQ ID NO: 24 or 25; and a VL domain comprising the amino acid sequence of SEQ ID NO: 28, an amino acid sequence at least about 85%, 90%, 95%, 99% or more identical to the amino acid sequence SEQ ID NO: 28, or an amino acid sequence which differs by no more than 1, 2, 5, 10, or 15 amino acid residues from the amino acid sequence of SEQ ID NO: 28.

[0542] In some embodiments, the anti-TCRβV antibody molecule, e.g., anti-TCRβ V12 antibody molecule comprises: a VH domain comprising the amino acid sequence of SEQ ID NO: 24 or 25, an amino acid sequence at least about 85%, 90%, 95%, 99% or more identical to the amino acid sequence SEQ ID NO: 24 or 25, or an amino acid sequence which differs by no more than 1, 2, 5, 10, or 15 amino acid residues from the amino acid sequence of SEQ ID NO: 24 or 25; and a VL domain comprising the amino acid sequence of SEQ ID NO: 29, an amino acid sequence at least about 85%, 90%, 95%, 99% or more identical to the amino acid sequence SEQ ID NO: 29, or an amino acid sequence which differs by no more than 1, 2, 5, 10, or 15 amino acid residues from the amino acid sequence of SEQ ID NO: 29.

[0543] In some embodiments, the anti-TCRβV antibody molecule, e.g., anti-TCRβ V12 antibody molecule comprises: a VH domain comprising the amino acid sequence of SEQ ID NO: 24 or 25, an amino acid sequence at least about 85%, 90%, 95%, 99% or more identical to the amino acid sequence SEQ ID NO: 24 or 25, or an amino acid sequence which differs by no more than 1, 2, 5, 10, or 15 amino acid residues from the amino acid sequence of SEQ ID NO: 24 or 25; and a VL domain comprising the amino acid sequence of SEQ ID NO: 30, an amino acid sequence at least about 85%, 90%, 95%, 99% or more identical to the amino acid sequence SEQ ID NO: 30, or an amino acid sequence which differs by no more than 1, 2, 5, 10, or 15 amino acid residues from the amino acid sequence of SEQ ID NO: 30.

[0544] In some embodiments, the anti-TCRβV antibody molecule, e.g., anti-TCRβ V12 antibody molecule comprises: a VH domain comprising the amino acid sequence of SEQ ID NO: 25 or 23, an amino acid sequence at least about 85%, 90%, 95%, 99% or more identical to the amino acid sequence SEQ ID NO: 25 or 23, or an amino acid sequence which differs by no more than 1, 2, 5, 10, or 15 amino acid residues from the amino acid sequence of SEQ ID NO: 25 or 23; and a VL domain comprising the amino acid sequence of SEQ ID NO: 26, an amino acid sequence at least about 85%, 90%, 95%, 99% or more identical to the amino acid sequence SEQ ID NO: 26, or an amino acid sequence which differs by no more than 1, 2, 5, 10, or 15 amino acid residues from the amino acid sequence of SEQ ID NO: 26.

[0545] In some embodiments, the anti-TCRβV antibody molecule, e.g., anti-TCRβ V12 antibody molecule comprises: a VH domain comprising the amino acid sequence of SEQ ID NO: 25 or 23, an amino acid sequence at least about 85%, 90%, 95%, 99% or more identical to the amino acid sequence SEQ ID NO: 25 or 23, or an amino acid sequence which differs by no more than 1, 2, 5, 10, or 15 amino acid residues from the amino acid sequence of SEQ ID NO: 25 or 23; and a VL domain comprising the amino acid sequence of SEQ ID NO: 27, an amino acid sequence at least about 85%, 90%, 95%, 99% or more identical to the amino acid sequence SEQ ID NO: 27, or an amino acid sequence which differs by no more than 1, 2, 5, 10, or 15 amino acid residues from the amino acid sequence of SEQ ID NO: 27.

[0546] In some embodiments, the anti-TCRβV antibody molecule, e.g., anti-TCRβ V12 antibody molecule comprises: a VH domain comprising the amino acid sequence of SEQ ID NO: 25 or 23, an amino acid sequence at least about 85%, 90%, 95%, 99% or more identical to the amino acid sequence SEQ ID NO: 25 or 23, or an amino acid sequence which differs by no more than 1, 2, 5, 10, or 15 amino acid residues from the amino acid sequence of SEQ ID NO: 25 or 23; and a VL domain comprising the amino acid sequence of SEQ ID NO: 28, an amino acid sequence at least about 85%, 90%, 95%, 99% or more identical to the amino acid sequence SEQ ID NO: 28, or an amino acid sequence which differs by no more than 1, 2, 5, 10, or 15 amino acid residues from the amino acid sequence of SEQ ID NO: 28.

[0547] In some embodiments, the anti-TCRβV antibody molecule, e.g., anti-TCRβ V12 antibody molecule comprises: a VH domain comprising the amino acid sequence of SEQ ID NO: 25 or 23, an amino acid sequence at least about 85%, 90%, 95%, 99% or more identical to the amino acid sequence SEQ ID NO: 25 or 23, or an amino acid sequence which differs by no more than 1, 2, 5, 10, or 15 amino acid residues from the amino acid sequence of SEQ ID NO: 25 or 23; and a VL domain comprising the amino acid sequence of SEQ ID NO: 29, an amino acid sequence at least about 85%, 90%, 95%, 99% or more identical to the amino acid sequence SEQ ID NO: 29, or an amino acid sequence which differs by no more than 1, 2, 5, 10, or 15 amino acid residues from the amino acid sequence of SEQ ID NO: 29.

[0548] In some embodiments, the anti-TCRβV antibody molecule, e.g., anti-TCRβ V12 antibody molecule comprises: a VH domain comprising the amino acid sequence of SEQ ID NO: 25 or 23, an amino acid sequence at least about 85%, 90%, 95%, 99% or more identical to the amino acid sequence SEQ ID NO: 25 or 23, or an amino acid sequence which differs by no more than 1, 2, 5, 10, or 15 amino acid residues from the amino acid sequence of SEQ ID NO: 25 or 23; and a VL domain comprising the amino acid sequence of SEQ ID NO: 30, an amino acid sequence at least about 85%, 90%, 95%, 99% or more identical to the amino acid sequence SEQ ID NO: 30, or an amino acid sequence which differs by no more than 1, 2, 5, 10, or 15 amino acid residues from the amino acid sequence of SEQ ID NO: 30.

[0549] In some embodiments, the anti-TCRβV antibody molecule, e.g., anti-TCRβ V12 antibody molecule is a full antibody or fragment thereof (e.g., a Fab, F(ab′)₂, Fv, or a single chain Fv fragment (scFv)). In embodiments, the anti-TCRβV antibody molecule, e.g., anti-TCRβ V6 (e.g., anti-TCRβ V6-5*01) antibody molecule is a monoclonal antibody or an antibody with single specificity. In some embodiments, the anti-TCRβV antibody molecule, e.g., anti-TCRβ V12 antibody molecule, can also be a humanized, chimeric, camelid, shark, or an in vitro-generated antibody molecule. In some embodiments, the anti-TCRβV antibody molecule, e.g., anti-TCRβ V12 antibody molecule is a humanized antibody molecule. The heavy and light chains of the anti-TCRβV antibody molecule, e.g., anti-TCRβ V12 antibody molecule can be full-length (e.g., an antibody can include at least one, and preferably two, complete heavy chains, and at least one, and preferably two, complete light chains) or can include an antigen-binding fragment (e.g., a Fab, F(ab′)2, Fv, a single chain Fv fragment, a single domain antibody, a diabody (dAb), a bivalent antibody, or bispecific antibody or fragment thereof, a single domain variant thereof, or a camelid antibody).

[0550] In some embodiments, the anti-TCRβV antibody molecule, e.g., anti-TCRβ V12 antibody molecule is in the form of a multispecific molecule, e.g., a bispecific molecule, e.g., as described herein.

[0551] In some embodiments, the anti-TCRβV antibody molecule, e.g., anti-TCRβ V12 antibody molecule has a heavy chain constant region (Fc) chosen from, e.g., the heavy chain constant regions of IgG1, IgG2, IgG3, IgG4, IgM, IgA1, IgA2, IgD, and IgE. In some embodiments, the Fc region is chosen from the heavy chain constant regions of IgG1, IgG2, IgG3, and IgG4. In some embodiments, the Fc region is chosen from the heavy chain constant region of IgG1 or IgG2 (e.g., human IgG1, or IgG2). In some embodiments, the heavy chain constant region is human IgG1.

[0552] In some embodiments, the anti-TCRβV antibody molecule, e.g., anti-TCRβ V12 antibody molecule has a light chain constant region chosen from, e.g., the light chain constant regions of kappa or lambda, preferably kappa (e.g., human kappa). In some embodiments, the constant region is altered, e.g., mutated, to modify the properties of the anti-TCRβV antibody molecule, e.g., anti-TCRβ V12 antibody molecule (e.g., to increase or decrease one or more of: Fc receptor binding, antibody glycosylation, the number of cysteine residues, effector cell function, or complement function). For example, the constant region is mutated at positions 296 (M to Y), 298 (S to T), 300 (T to E), 477 (H to K) and 478 (N to F) to alter Fc receptor binding (e.g., the mutated positions correspond to positions 132 (M to Y), 134 (S to T), 136 (T to E), 313 (H to K) and 314 (N to F) of SEQ ID NOs: 212 or 214; or positions 135 (M to Y), 137 (S to T), 139 (T to E), 316 (H to K) and 317 (N to F) of SEQ ID NOs: 215, 216, 217 or 218).

[0553] Antibody B-H.1 comprises a first chain comprising the amino acid sequence of SEQ ID NO: 3280 and a second chain comprising the amino acid sequence of SEQ ID NO: 3281.

[0554] Additional exemplary anti-TCRβ V12 antibodies are provided in Table 2. In some embodiments, the anti-TCRβ V12 is antibody B, e.g., humanized antibody B (antibody B-H), as provided in Table 2. In some embodiments, the anti-TCRβV antibody comprises one or more (e.g., all three) of a LC CDR1, LC CDR2, and LC CDR3 provided in Table 2; and/or one or more (e.g., all three) of a HC CDR1, HC CDR2, and HC CDR3 provided in Table 2, or a sequence with at least 95% sequence identity thereto. In some embodiments, antibody B comprises a variable heavy chain (VH) and/or a variable light chain (VL) provided in Table 2, or a sequence with at least 95% sequence identity thereto.

[0555] In some embodiments, the anti-TCRVB 12 antibody molecule (e.g., anti-TCRVB 12-3 or anti-TCRVB 12-4 antibody molecule) comprises a VH of B-H.1A, B-H.1B, B-H.1C, B-H.1D, B-H.1E, B-H.1F, B-H.1G, B-H.1H, B-H.1, B-H.2, B-H.3, B-H.4, B-H.5, or B-H.6, or a sequence with at least 80%, 85%, 90%, 95%, 96%, 97%, 98%, 99% or more identity thereto.

[0556] In some embodiments, the anti-TCRVB 12 antibody molecule (e.g., anti-TCRVB 12-3 or anti-TCRVB 12-4 antibody molecule) comprises a VL of B-H.1A, B-H.1B, B-H.1C, B-H.1D, B-H.1E, B-H.1F, B-H.1G, B-H.1H, B-H.1, B-H.2, B-H.3, B-H.4, B-H.5, or B-H.6, or a sequence with at least 80%, 85%, 90%, 95%, 96%, 97%, 98%, 99% or more identity thereto.

[0557] In some embodiments, the anti-TCRVB 12 antibody molecule (e.g., anti-TCRVB 12-3 or anti-TCRVB 12-4 antibody molecule) comprises a VH of B-H.1A, B-H.1B, B-H.1C, B-H.1D, B-H.1E, B-H.1F, B-H.1G, B-H.1H, B-H.1, B-H.2, B-H.3, B-H.4, B-H.5, or B-H.6, or a sequence with at least 80%, 85%, 90%, 95%, 96%, 97%, 98%, 99% or more identity thereto; and a VL of B-H.1A, B-H.1B, B-H.1C, B-H.1D, B-H.1E, B-H.1F, B-H.1G, B-H.1H, B-H.1, B-H.2, B-H.3, B-H.4, B-H.5, or B-H.6, or a sequence with at least 80%, 85%, 90%, 95%, 96%, 97%, 98%, 99% or more identity thereto.

### Anti-TCRβ V5 Antibodies

[0558] In one aspect, provided herein is an anti-TCRβV antibody molecule that binds to human TCRβ V5. In some embodiments, the TCRβ V5 subfamily comprises TCRβ V5-5*01, TCRβ V5-6*01, TCRβ V5-4*01, TCRβ V5-8*01, TCRβ V5-1*01, or a variant thereof.

[0559] Exemplary anti-TCRβ V5 antibodies are provided in Table 10B. In some embodiments, the anti-TCRβ V5 is antibody C, e.g., humanized antibody C (antibody C-H), as provided in Table 10B. In some embodiments, the anti-TCRβV antibody comprises one or more (e.g., all three) of a LC CDR1, LC CDR2, and LC CDR3 provided in Table 10B; and/or one or more (e.g., all three) of a HC CDR1, HC CDR2, and HC CDR3 provided in Table 10B, or a sequence with at least 95% sequence identity thereto. In some embodiments, antibody C comprises a variable heavy chain (VH) and/or a variable light chain (VL) provided in Table 10B, or a sequence with at least 95% sequence identity thereto.

[0560] Exemplary anti-TCRβ V5 antibodies are provided in Table 11. In some embodiments, the anti-TCRβ V5 is antibody E, e.g., humanized antibody E (antibody E-H), as provided in Table 11. In some embodiments, the anti-TCRβV antibody comprises one or more (e.g., all three) of a LC CDR1, LC CDR2, and LC CDR3 provided in Table 11; and/or one or more (e.g., all three) of a HC CDR1, HC CDR2, and HC CDR3 provided in Table 11, or a sequence with at least 95% sequence identity thereto. In some embodiments, antibody E comprises a variable heavy chain (VH) and/or a variable light chain (VL) provided in Table 11, or a sequence with at least 95% sequence identity thereto.

[0561] In some embodiments, antibody E comprises a heavy chain comprising the amino acid sequence of SEQ ID NO: 3284 and/or a light chain comprising the amino acid sequence of SEQ ID NO: 3285, or a sequence with at least 95% sequence identity thereto.

[0562] In some embodiments, the anti-TCRβ V5 antibody molecule comprises a VH and/or a VL of an antibody described in Table 10B, or a sequence with at least 80%, 85%, 90%, 95%, 96%, 97%, 98%, 99% or more identity thereto.

[0563] In some embodiments, the anti-TCRβ V5 antibody molecule comprises a VH and a VL of an antibody described in Table 10B, or a sequence with at least 80%, 85%, 90%, 95%, 96%, 97%, 98%, 99% or more identity thereto.

[0564] In some embodiments, the anti-TCRβ V5 antibody molecule comprises a VH and/or a VL of an antibody described in Table 11, or a sequence with at least 80%, 85%, 90%, 95%, 96%, 97%, 98%, 99% or more identity thereto.

[0565] In some embodiments, the anti-TCRβ V5 antibody molecule comprises a VH and a VL of an antibody described in Table 11, or a sequence with at least 80%, 85%, 90%, 95%, 96%, 97%, 98%, 99% or more identity thereto.

### Anti-TCRβ V10 Antibodies

[0566] In one aspect, provided herein is an anti-TCRβV antibody molecule that binds to a human TCRβ V10 subfamily member. In some embodiments, TCRβ V10 subfamily is also known as TCRβ V12. In some embodiments, the TCRβ V10 subfamily comprises: TCRβ V10-1*01, TCRβ V10-1*02, TCRβ V10-3*01 or TCRβ V10-2*01, or a variant thereof.

[0567] Exemplary anti-TCRβ V10 antibodies are provided in Table 12. In some embodiments, the anti-TCRβ V10 is antibody D, e.g., humanized antibody D (antibody D-H), as provided in Table 12. In some embodiments, antibody D comprises one or more (e.g., three) light chain CDRs and/or one or more (e.g., three) heavy chain CDRs provided in Table 12, or a sequence with at least 95% sequence identity thereto. In some embodiments, antibody D comprises a variable heavy chain (VH) and/or a variable light chain (VL) provided in Table 12, or a sequence with at least 95% sequence identity thereto.

[0568] In some embodiments, the anti-TCRβ V10 antibody molecule comprises a VH or a VL of an antibody described in Table 12, or a sequence with at least 80%, 85%, 90%, 95%, 96%, 97%, 98%, 99% or more identity thereto.

[0569] In some embodiments, the anti-TCRβ V10 antibody molecule comprises a VH and a VL of an antibody described in Table 12, or a sequence with at least 80%, 85%, 90%, 95%, 96%, 97%, 98%, 99% or more identity thereto.

### Additional Anti-TCRVβ Antibodies

[0570] Additional exemplary anti-TCRβV antibodies are provided in Table 13. In some embodiments, the anti-TCRβV antibody is a humanized antibody, e.g., as provided in Table 13. In some embodiments, the anti-TCRβV antibody comprises one or more (e.g., all three) of a LC CDR1, LC CDR2, and LC CDR3 provided in Table 13; and/or one or more (e.g., all three) of a HC CDR1, HC CDR2, and HC CDR3 provided in Table 13, or a sequence with at least 95% sequence identity thereto. In some embodiments, the anti-TCRβV antibody comprises a variable heavy chain (VH) and/or a variable light chain (VL) provided in Table 13, or a sequence with at least 95% sequence identity thereto.

### Antibody-Like Frameworks or Scaffolds

[0571] A wide variety of antibody/immunoglobulin frameworks or scaffolds can be employed in the anti-TCRvb antibody molecules as described herein or multifunctional formats thereof so long as the resulting polypeptide includes at least one binding region which specifically binds to the target antigen, e.g., a TCRvb, a tumor antigen, among others. Such frameworks or scaffolds include the 5 main idiotypes of human immunoglobulins, or fragments thereof, and include immunoglobulins of other animal species, preferably having humanized aspects. Novel frameworks, scaffolds and fragments continue to be discovered and developed by those skilled in the art.

[0572] In some embodiments, the anti-TCRvb antibody molecules as described herein or multifunctional formats thereof include non-immunoglobulin based antibodies using non-immunoglobulin scaffolds onto which CDRs can be grafted. Any non-immunoglobulin frameworks and scaffolds may be employed, as long as they comprise a binding region specific for the target antigen (e.g., TCRvb or a tumor antigen). Exemplary non-immunoglobulin frameworks or scaffolds include, but are not limited to, fibronectin (Compound Therapeutics, Inc., Waltham, MA), ankyrin (Molecular Partners AG, Zurich, Switzerland), domain antibodies (Domantis, Ltd., Cambridge, MA, and Ablynx nv, Zwijnaarde, Belgium), lipocalin (Pieris Proteolab AG, Freising, Germany), small modular immuno-pharmaceuticals (Trubion Pharmaceuticals Inc., Seattle, WA), maxybodies (Avidia, Inc., Mountain View, CA), Protein A (Affibody AG, Sweden), and affilin (gamma-crystallin or ubiquitin) (Scil Proteins GmbH, Halle, Germany).

[0573] Fibronectin scaffolds are typically based on fibronectin type III domain (e.g., the tenth module of the fibronectin type III (10 Fn3 domain)). The fibronectin type III domain has 7 or 8 beta strands which are distributed between two beta sheets, which themselves pack against each other to form the core of the protein, and further containing loops (analogous to CDRs) which connect the beta strands to each other and are solvent exposed. There are at least three such loops at each edge of the beta sheet sandwich, where the edge is the boundary of the protein perpendicular to the direction of the beta strands (see U.S. Pat. No. 6,818,418). Because of this structure, the non-immunoglobulin antibody mimics antigen binding properties that are similar in nature and affinity to those of antibodies. These scaffolds can be used in a loop randomization and shuffling strategy in vitro that is similar to the process of affinity maturation of antibodies in vivo. These fibronectin-based molecules can be used as scaffolds where the loop regions of the molecule can be replaced with CDRs of the invention using standard cloning techniques.

[0574] The ankyrin technology is based on using proteins with ankyrin derived repeat modules as scaffolds for bearing variable regions which can be used for binding to different targets. The ankyrin repeat module typically is a about 33 amino acid polypeptide consisting of two anti-parallel α-helices and a β-turn. Binding of the variable regions can be optimized by using ribosome display.

[0575] Avimers are used by nature for protein-protein interactions and in human over 250 proteins are structurally based on A-domains. Avimers consist of a number of different “A-domain” monomers (2-10) linked via amino acid linkers. Avimers can be created that can bind to the target antigen using the methodology described in, for example, U.S. Patent Application Publication Nos. 20040175756; 20050053973; 20050048512; and 20060008844.

[0576] Affibody affinity ligands are small, simple proteins composed of a three-helix bundle based on the scaffold of one of the IgG-binding domains of Protein A. Protein A is a surface protein from the bacterium Staphylococcus aureus. This scaffold domain consists of 58 amino acids, 13 of which are randomized to generate affibody libraries with a large number of ligand variants (See e.g., U.S. Pat. No. 5,831,012). Affibody molecules mimic antibodies, they have a molecular weight of 6 kDa, compared to the molecular weight of antibodies, which is 150 kDa. In spite of its small size, the binding site of affibody molecules is similar to that of an antibody.

[0577] Anticalins are known commercially, e.g., Pieris ProteoLab AG. They are derived from lipocalins, a widespread group of small and robust proteins that are usually involved in the physiological transport or storage of chemically sensitive or insoluble compounds. Several natural lipocalins occur in human tissues or body liquids. The protein architecture is reminiscent of immunoglobulins, with hypervariable loops on top of a rigid framework. However, in contrast with antibodies or their recombinant fragments, lipocalins are composed of a single polypeptide chain with 160 to 180 amino acid residues, being just marginally bigger than a single immunoglobulin domain. The set of four loops, which makes up the binding pocket, shows pronounced structural plasticity and tolerates a variety of side chains. The binding site can thus be reshaped in a proprietary process in order to recognize prescribed target molecules of different shape with high affinity and specificity. One protein of lipocalin family, the bilin-binding protein (BBP) of Pieris Brassicae has been used to develop anticalins by mutagenizing the set of four loops. One example of a patent application describing anticalins is in PCT Publication No. WO 199916873.

[0578] Affilin molecules are small non-immunoglobulin proteins which are designed for specific affinities towards proteins and small molecules. New affilin molecules can be very quickly selected from two libraries, each of which is based on a different human derived scaffold protein. Affilin molecules do not show any structural homology to immunoglobulin proteins. Currently, two affilin scaffolds are employed, one of which is gamma crystalline, a human structural eye lens protein and the other is “ubiquitin” superfamily proteins. Both human scaffolds are very small, show high temperature stability and are almost resistant to pH changes and denaturing agents. This high stability is mainly due to the expanded beta sheet structure of the proteins. Examples of gamma crystalline derived proteins are described in WO200104144 and examples of “ubiquitin-like” proteins are described in WO2004106368.

[0579] Protein epitope mimetics (PEM) are medium-sized, cyclic, peptide-like molecules (MW 1-2 kDa) mimicking beta-hairpin secondary structures of proteins, the major secondary structure involved in protein-protein interactions.

[0580] Domain antibodies (dAbs) can be used in the anti-TCRvb antibody molecules as described herein or multifunctional formats thereof are small functional binding fragments of antibodies, corresponding to the variable regions of either the heavy or light chains of antibodies. Domain antibodies are well expressed in bacterial, yeast, and mammalian cell systems. Further details of domain antibodies and methods of production thereof are known in the art (see, for example, U.S. Pat. Nos. 6,291,158; 6,582,915; 6,593,081; 6,172,197; 6,696,245; European Patents 0368684 & 0616640; WO05/035572, WO04/101790, WO04/081026, WO04/058821, WO04/003019 and WO03/002609. Nanobodies are derived from the heavy chains of an antibody.

[0581] A nanobody typically comprises a single variable domain and two constant domains (CH2 and CH3) and retains antigen-binding capacity of the original antibody. Nanobodies can be prepared by methods known in the art (See e.g., U.S. Pat. Nos. 6,765,087, 6,838,254, WO 06/079372). Unibodies consist of one light chain and one heavy chain of an IgG4 antibody. Unibodies may be made by the removal of the hinge region of IgG4 antibodies. Further details of unibodies and methods of preparing them may be found in WO2007/059782.

### Anti-TCRVβ Antibody Effector Function and Fc Variants

[0582] In some embodiments, an anti-TCRVβ antibody as described herein comprises an Fc region, e.g., as described herein. In some embodiments, the Fc region is a wildtype Fc region, e.g., a wildtype human Fc region. In some embodiments, the Fc region comprises a variant, e.g., an Fc region comprising an addition, substitution, or deletion of at least one amino acid residue in the Fc region which results in, e.g., reduced or ablated affinity for at least one Fc receptor.

[0583] The Fc region of an antibody interacts with a number of receptors or ligands including Fe Receptors (e.g., FcγRI, FcγRIIA, FcγRIIIA), the complement protein CIq, and other molecules such as proteins A and G. These interactions are essential for a variety of effector functions and downstream signaling events including: antibody dependent cell-mediated cytotoxicity (ADCC), Antibody-dependent cellular phagocytosis (ADCP) and complement dependent cytotoxicity (CDC).

[0584] In some embodiments, an anti-TCRVβ antibody comprising a variant Fc region has reduced, e.g., ablated, affinity for an Fc receptor, e.g., an Fc receptor described herein. In some embodiments, the reduced affinity is compared to an otherwise similar antibody with a wildtype Fc region.

[0585] In some embodiments, an anti-TCRVβ antibody comprising a variant Fc region has one or more of the following properties: (1) reduced effector function (e.g., reduced ADCC, ADCP and/or CDC); (2) reduced binding to one or more Fc receptors; and/or (3) reduced binding to C1q complement. In some embodiments, the reduction in any one, or all of properties (1)-(3) is compared to an otherwise similar antibody with a wildtype Fc region.

[0586] In some embodiments, an anti-TCRVβ antibody comprising a variant Fc region has reduced affinity to a human Fc receptor, e.g., FcγR I, FcγR II and/or FcγR III. In some embodiments, the anti-TCRVβ antibody comprising a variant Fc region comprises a human IgG1 region or a human IgG4 region.

[0587] In some embodiments, an anti-TCRVβ antibody comprising a variant Fc region activates and/or expands T cells, e.g., as described herein. In some embodiments, an anti-TCRVβ antibody comprising a variant Fc region has a cytokine profile described herein, e.g., a cytokine profile that differs from a cytokine profile of a T cell engager that binds to a receptor or molecule other than a TCRβV region (“a non-TCRβV-binding T cell engager”). In some embodiments, the non-TCRβV-binding T cell engager comprises an antibody that binds to a CD3 molecule (e.g., CD3 epsilon (CD3e) molecule); or a TCR alpha (TCRα) molecule.

[0588] Exemplary Fc region variants are provided in Table 14 and also disclosed in Saunders O, (2019) Frontiers in Immunology; vol 10, article 1296, the entire contents of which is hereby incorporated by reference.

[0589] In some embodiments, an anti-TCRVβ antibody as described herein comprises any one or all, or any combination of Fc region variants disclosed in Table 14.

[0590] In some embodiments, an anti-TCRVβ antibody as described herein comprises any one or all, or any combination of Fc region variants, e.g., mutations, disclosed in Table 14. In some embodiments, an anti-TCRVβ antibody as described herein comprise an Asn297Ala (N297A) mutation. In some embodiments, an anti-TCRVβ antibody as described herein comprise a Leu234Ala/Leu235Ala (LALA) mutation.

### Multifunctional Molecules

[0591] As used herein, a “multifunctional” or a “multispecific” molecule refers to molecule, e.g., a polypeptide, that has two or more functionalities, e.g., two or more binding specificities. In some embodiments, the functionalities can include one or more immune cell engagers, one or more tumor binding molecules, one or more cytokine molecules, one or more stromal modifiers, and other moieties described herein. In some embodiments, the multispecific molecule is a multispecific antibody molecule, e.g., a bispecific antibody molecule. In some embodiments, the multispecific molecule includes an anti-TCRVb antibody molecule as described herein.

[0592] Described herein, in certain embodiments, is a multifunctional polypeptide molecule comprising a first polypeptide, a second polypeptide, a third polypeptide, a fourth polypeptide, and at least one cytokine polypeptide or a functional fragment or a functional variant thereof, wherein the first polypeptide, the second polypeptide, the third polypeptide, and the fourth polypeptide are non-contiguous, wherein: (i) the first polypeptide comprising a first portion of a first T cell receptor variable beta (TCRβV)-binding moiety and a first dimerization module linked to the first portion of the first TCRβV-binding moiety; (ii) the second polypeptide comprising a second portion of the first TCRβV-binding moiety; (iii) the third polypeptide comprising a first portion of a second TCRβV-binding moiety and a second dimerization module linked to the first portion of the second TCRβV-binding moiety; and (iv) the fourth polypeptide comprising a second portion of the second TCRβV-binding moiety; and wherein the at least one cytokine polypeptide or a functional fragment or a functional variant thereof is covalently linked to the first polypeptide, the second polypeptide, the third polypeptide, the fourth polypeptide, or a combination thereof.

[0593] Described herein, in certain embodiments, is a multifunctional polypeptide molecule comprising a first polypeptide, a second polypeptide, a third polypeptide, and at least one cytokine polypeptide or a functional fragment or a functional variant thereof, wherein the first polypeptide, the second polypeptide, and the third polypeptide are non-contiguous, wherein: (i) the first polypeptide comprising a first portion of a first TCRβV-binding moiety and a first dimerization module linked to the first portion of the first TCRβV-binding moiety; (ii) the second polypeptide comprising a second portion of the first TCRβV-binding moiety; and (iii) the third polypeptide comprising a second dimerization module; and wherein the at least one cytokine polypeptide or a functional fragment or a functional variant thereof is covalently linked to the first polypeptide, the second polypeptide, the third polypeptide, or a combination thereof.

[0594] Described herein, in certain embodiments, is a multifunctional polypeptide molecule comprising a first polypeptide, a second polypeptide, a third polypeptide, and at least one cytokine polypeptide or a functional fragment or a functional variant thereof, wherein the first polypeptide, the second polypeptide, and the third polypeptide are non-contiguous, wherein: (i) the first polypeptide comprising a first portion of a first TCRβV-binding moiety and a first dimerization module linked to the first portion of the first TCRβV-binding moiety; (ii) the second polypeptide comprising a second portion of the first TCRβV-binding moiety; and (iii) the third polypeptide comprising a second dimerization module; wherein the at least one cytokine polypeptide or a functional fragment or a functional variant thereof is covalently linked to the first polypeptide, the second polypeptide, the third polypeptide, or a combination thereof; and wherein the multifunctional polypeptide molecule does not comprise an additional TCRβV-binding moiety except the first TCRβV-binding moiety.

[0595] In some embodiments, the first portion of the first TCRβV-binding moiety comprises a first heavy chain variable domain (VH) and a first heavy chain constant domain 1 (CH1) linked to the first VH. In some embodiments, the first CH1 is linked to the C-terminus of the first VH. In some embodiments, the second portion of the first TCRβV-binding moiety comprises a first light chain variable domain (VL) and a first light chain constant domain (CL) linked to the first VL. In some embodiments, first CL is linked to the C-terminus of the first VL. In some embodiments, wherein the first dimerization module is linked to the first portion of the first TCRβV-binding moiety. In some embodiments, the first dimerization module is linked to the C-terminus of the first portion of the first TCRβV-binding moiety. In some embodiments, wherein the first portion of the second TCRβV-binding moiety comprises a second VH and a second CH1 linked to the second VH. In some embodiments, the second CH1 is linked to the C-terminus of the second VH. In some embodiments, the second portion of the second TCRβV-binding moiety comprises a second VL and a second CL linked to the second VL. In some embodiments, the second CL is linked to the C-terminus of the second VL. In some embodiments, the second dimerization module is linked to the first portion of the second TCRβV-binding moiety. In some embodiments, the second dimerization module is linked to the C-terminus of the first portion of the second TCRβV-binding moiety.

[0596] In some embodiments, (a) the N-terminus of the first polypeptide is linked to a first cytokine polypeptide or a functional fragment or a functional variant thereof; the C-terminus of the first polypeptide is linked to a second cytokine polypeptide or a functional fragment or a functional variant thereof; or a combination thereof; (b) the N-terminus of the second polypeptide is linked to a third cytokine polypeptide or a functional fragment or a functional variant thereof; the C-terminus of the second polypeptide is linked to a fourth cytokine polypeptide or a functional fragment or a functional variant thereof; or a combination thereof; (c) the N-terminus of the third polypeptide is linked to a fifth cytokine polypeptide or a functional fragment or a functional variant thereof; the C-terminus of the third polypeptide is linked to a sixth cytokine polypeptide or a functional fragment or a functional variant thereof; or a combination thereof; (d) the N-terminus of the fourth polypeptide is linked to a seventh cytokine polypeptide or a functional fragment or a functional variant thereof; the C-terminus of the fourth polypeptide is linked to an eighth cytokine polypeptide or a functional fragment or a functional variant thereof; or a combination thereof; or (e) a combination thereof.

[0597] In some embodiments, (a-1) the N-terminus of the first polypeptide is linked to the first cytokine polypeptide or a functional fragment or a functional variant thereof; the C-terminus of the first polypeptide is linked to the second cytokine polypeptide or a functional fragment or a functional variant thereof; or a combination thereof; and (a-2) the N-terminus of the second polypeptide is linked to the third cytokine polypeptide or a functional fragment or a functional variant thereof; the C-terminus of the second polypeptide is linked to the fourth cytokine polypeptide or a functional fragment or a functional variant thereof; or a combination thereof; (b-1) the N-terminus of the first polypeptide is linked to the first cytokine polypeptide or a functional fragment or a functional variant thereof; the C-terminus of the first polypeptide is linked to the second cytokine polypeptide or a functional fragment or a functional variant thereof; or a combination thereof; and (b-2) the N-terminus of the third polypeptide is linked to the fifth cytokine polypeptide or a functional fragment or a functional variant thereof; the C-terminus of the third polypeptide is linked to the sixth cytokine polypeptide or a functional fragment or a functional variant thereof; or a combination thereof; (c-1) the N-terminus of the first polypeptide is linked to the first cytokine polypeptide or a functional fragment or a functional variant thereof; the C-terminus of the first polypeptide is linked to the second cytokine polypeptide or a functional fragment or a functional variant thereof; or a combination thereof; and (c-2) the N-terminus of the fourth polypeptide is linked to the seventh cytokine polypeptide or a functional fragment or a functional variant thereof; the C-terminus of the fourth polypeptide is linked to the eighth cytokine polypeptide or a functional fragment or a functional variant thereof; or a combination thereof; (d-1) the N-terminus of the second polypeptide is linked to the third cytokine polypeptide or a functional fragment or a functional variant thereof; the C-terminus of the second polypeptide is linked to the fourth cytokine polypeptide or a functional fragment or a functional variant thereof; or a combination thereof; and (d-2) the N-terminus of the third polypeptide is linked to the fifth cytokine polypeptide or a functional fragment or a functional variant thereof; the C-terminus of the third polypeptide is linked to the sixth cytokine polypeptide or a functional fragment or a functional variant thereof; or a combination thereof; (e-1) the N-terminus of the second polypeptide is linked to the third cytokine polypeptide or a functional fragment or a functional variant thereof; the C-terminus of the second polypeptide is linked to the fourth cytokine polypeptide or a functional fragment or a functional variant thereof; or a combination thereof; and (e-2) the N-terminus of the fourth polypeptide is linked to the seventh cytokine polypeptide or a functional fragment or a functional variant thereof; the C-terminus of the fourth polypeptide is linked to the eighth cytokine polypeptide or a functional fragment or a functional variant thereof; or a combination thereof; or (f-1) the N-terminus of the third polypeptide is linked to the fifth cytokine polypeptide or a functional fragment or a functional variant thereof; the C-terminus of the third polypeptide is linked to the sixth cytokine polypeptide or a functional fragment or a functional variant thereof; or a combination thereof; and (f-2) the N-terminus of the fourth polypeptide is linked to the seventh cytokine polypeptide or a functional fragment or a functional variant thereof; the C-terminus of the fourth polypeptide is linked to the eighth cytokine polypeptide or a functional fragment or a functional variant thereof; or a combination thereof.

[0598] In some embodiments, (a-1) the N-terminus of the first polypeptide is linked to the first cytokine polypeptide or a functional fragment or a functional variant thereof; the C-terminus of the first polypeptide is linked to the second cytokine polypeptide or a functional fragment or a functional variant thereof; or a combination thereof; (a-2) the N-terminus of the second polypeptide is linked to the third cytokine polypeptide or a functional fragment or a functional variant thereof; the C-terminus of the second polypeptide is linked to the fourth cytokine polypeptide or a functional fragment or a functional variant thereof; or a combination thereof; and (a-3) the N-terminus of the third polypeptide is linked to the fifth cytokine polypeptide or a functional fragment or a functional variant thereof; the C-terminus of the third polypeptide is linked to the sixth cytokine polypeptide or a functional fragment or a functional variant thereof; or a combination thereof; (b-1) the N-terminus of the first polypeptide is linked to the first cytokine polypeptide or a functional fragment or a functional variant thereof; the C-terminus of the first polypeptide is linked to the second cytokine polypeptide or a functional fragment or a functional variant thereof; or a combination thereof; (b-2) the N-terminus of the second polypeptide is linked to the third cytokine polypeptide or a functional fragment or a functional variant thereof; the C-terminus of the second polypeptide is linked to the fourth cytokine polypeptide or a functional fragment or a functional variant thereof; or a combination thereof; and (b-3) the N-terminus of the fourth polypeptide is linked to the seventh cytokine polypeptide or a functional fragment or a functional variant thereof; the C-terminus of the fourth polypeptide is linked to the eighth cytokine polypeptide or a functional fragment or a functional variant thereof; or a combination thereof; or (c-1) the N-terminus of the second polypeptide is linked to the third cytokine polypeptide or a functional fragment or a functional variant thereof; the C-terminus of the second polypeptide is linked to the fourth cytokine polypeptide or a functional fragment or a functional variant thereof; or a combination thereof; (c-2) the N-terminus of the third polypeptide is linked to the fifth cytokine polypeptide or a functional fragment or a functional variant thereof; the C-terminus of the third polypeptide is linked to the sixth cytokine polypeptide or a functional fragment or a functional variant thereof; or a combination thereof; and (c-3) the N-terminus of the fourth polypeptide is linked to the seventh cytokine polypeptide or a functional fragment or a functional variant thereof; the C-terminus of the fourth polypeptide is linked to the eighth cytokine polypeptide or a functional fragment or a functional variant thereof; or a combination thereof.

[0599] In some embodiments, (1) the N-terminus of the first polypeptide is linked to the first cytokine polypeptide or a functional fragment or a functional variant thereof; the C-terminus of the first polypeptide is linked to the second cytokine polypeptide or a functional fragment or a functional variant thereof; or a combination thereof; (2) the N-terminus of the second polypeptide is linked to the third cytokine polypeptide or a functional fragment or a functional variant thereof; the C-terminus of the second polypeptide is linked to the fourth cytokine polypeptide or a functional fragment or a functional variant thereof; or a combination thereof; (3) the N-terminus of the third polypeptide is linked to the fifth cytokine polypeptide or a functional fragment or a functional variant thereof; the C-terminus of the third polypeptide is linked to the sixth cytokine polypeptide or a functional fragment or a functional variant thereof; or a combination thereof; and (4) the N-terminus of the fourth polypeptide is linked to the seventh cytokine polypeptide or a functional fragment or a functional variant thereof; the C-terminus of the fourth polypeptide is linked to the eighth cytokine polypeptide or a functional fragment or a functional variant thereof; or a combination thereof.

[0600] In some embodiments, the first cytokine polypeptide, the second cytokine polypeptide, or a combination thereof is within a single contiguous polypeptide chain of the first polypeptide, the third cytokine polypeptide, the fourth cytokine polypeptide, or a combination thereof is within a single contiguous polypeptide chain of the second polypeptide, the fifth cytokine polypeptide, the sixth cytokine polypeptide, or a combination thereof is within a single contiguous polypeptide chain of the third polypeptide, the seventh cytokine polypeptide, the eighth cytokine polypeptide, or a combination thereof is within a single contiguous polypeptide chain of the fourth polypeptide, or a combination thereof.

[0601] In some embodiments, (a) the N-terminus of the first polypeptide is linked to a first cytokine polypeptide or a functional fragment or a functional variant thereof; the C-terminus of the first polypeptide is linked to a second cytokine polypeptide or a functional fragment or a functional variant thereof; or a combination thereof; (b) the N-terminus of the second polypeptide is linked to a third cytokine polypeptide or a functional fragment or a functional variant thereof; the C-terminus of the second polypeptide is linked to a fourth cytokine polypeptide or a functional fragment or a functional variant thereof; or a combination thereof; (c) the N-terminus of the third polypeptide is linked to a fifth cytokine polypeptide or a functional fragment or a functional variant thereof; the C-terminus of the third polypeptide is linked to a sixth cytokine polypeptide or a functional fragment or a functional variant thereof; or a combination thereof; or (d) a combination thereof.

[0602] In some embodiments, (a-1) the N-terminus of the first polypeptide is linked to the first cytokine polypeptide or a functional fragment or a functional variant thereof; the C-terminus of the first polypeptide is linked to the second cytokine polypeptide or a functional fragment or a functional variant thereof; or a combination thereof; and (a-2) the N-terminus of the second polypeptide is linked to the third cytokine polypeptide or a functional fragment or a functional variant thereof; the C-terminus of the second polypeptide is linked to the fourth cytokine polypeptide or a functional fragment or a functional variant thereof; or a combination thereof; (b-1) the N-terminus of the first polypeptide is linked to the first cytokine polypeptide or a functional fragment or a functional variant thereof; the C-terminus of the first polypeptide is linked to the second cytokine polypeptide or a functional fragment or a functional variant thereof; or a combination thereof; and (b-2) the N-terminus of the third polypeptide is linked to the fifth cytokine polypeptide or a functional fragment or a functional variant thereof; the C-terminus of the third polypeptide is linked to the sixth cytokine polypeptide or a functional fragment or a functional variant thereof; or a combination thereof; or (c-1) the N-terminus of the second polypeptide is linked to the third cytokine polypeptide or a functional fragment or a functional variant thereof; the C-terminus of the second polypeptide is linked to the fourth cytokine polypeptide or a functional fragment or a functional variant thereof; or a combination thereof; and (c-2) the N-terminus of the third polypeptide is linked to the fifth cytokine polypeptide or a functional fragment or a functional variant thereof; the C-terminus of the third polypeptide is linked to the sixth cytokine polypeptide or a functional fragment or a functional variant thereof; or a combination thereof.

[0603] In some embodiments, (1) the N-terminus of the first polypeptide is linked to the first cytokine polypeptide or a functional fragment or a functional variant thereof; the C-terminus of the first polypeptide is linked to the second cytokine polypeptide or a functional fragment or a functional variant thereof; or a combination thereof; (2) the N-terminus of the second polypeptide is linked to the third cytokine polypeptide or a functional fragment or a functional variant thereof; the C-terminus of the second polypeptide is linked to the fourth cytokine polypeptide or a functional fragment or a functional variant thereof; or a combination thereof; and (3) the N-terminus of the third polypeptide is linked to the fifth cytokine polypeptide or a functional fragment or a functional variant thereof; the C-terminus of the third polypeptide is linked to the sixth cytokine polypeptide or a functional fragment or a functional variant thereof; or a combination thereof.

[0604] In some embodiments, the first cytokine polypeptide, the second cytokine polypeptide, or a combination thereof is within a single contiguous polypeptide chain of the first polypeptide, the third cytokine polypeptide, the fourth cytokine polypeptide, or a combination thereof is within a single contiguous polypeptide chain of the second polypeptide, the fifth cytokine polypeptide, the sixth cytokine polypeptide, or a combination thereof is within a single contiguous polypeptide chain of the third polypeptide, or a combination thereof.

[0605] In some embodiments, the multifunctional polypeptide molecule as described herein further comprises a linker between the first portion of the first TCRβV-binding moiety and the first dimerization module, a linker between the first portion of the second TCRβV-binding moiety and the second dimerization module, a linker between the first VH and the first CH1, a linker between the first VL and the first CL, a linker between the second VH and the second CH1, a linker between the second VL and the second CL, a linker between the at least one cytokine polypeptide or a functional fragment or a functional variant thereof and the first polypeptide, a linker between the at least one cytokine polypeptide or a functional fragment or a functional variant thereof and the second polypeptide, a linker between the at least one cytokine polypeptide or a functional fragment or a functional variant thereof and the third polypeptide, a linker between the at least one cytokine polypeptide or a functional fragment or a functional variant thereof and the fourth polypeptide, or a combination thereof.

[0606] In some embodiments, the multifunctional polypeptide molecule as described herein further comprises comprising a linker between the first portion of the first TCRβV-binding moiety and the first dimerization module, a linker between the first VH and the first CH1, a linker between the first VL and the first CL, a linker between the at least one cytokine polypeptide or a functional fragment or a functional variant thereof and the first polypeptide, a linker between the at least one cytokine polypeptide or a functional fragment or a functional variant thereof and the second polypeptide, a linker between the at least one cytokine polypeptide or a functional fragment or a functional variant thereof and the third polypeptide, or a combination thereof. In some embodiments, linker is selected from the group consisting of a cleavable linker, a non-cleavable linker, a peptide linker, a flexible linker, a rigid linker, a helical linker, and a non-helical linker. In some embodiments, the linker is the peptide linker and wherein the linker is a GS linker. In some embodiments, the linker is the peptide linker and wherein the linker comprises the sequence of SEQ ID NO: 3308 or SEQ ID NO: 3643.

[0607] Described herein, in certain embodiments, is a multifunctional polypeptide molecule comprising a first polypeptide, a second polypeptide, a third polypeptide, a fourth polypeptide, a first cytokine polypeptide or a functional fragment or a functional variant thereof, and a second cytokine polypeptide or a functional fragment or a functional variant thereof, wherein the first polypeptide, the second polypeptide, the third polypeptide, and the fourth polypeptide are non-contiguous, wherein: (i) the first polypeptide comprising a first portion of a first TCRβV-binding moiety and a first dimerization module linked to the first portion of the first TCRβV-binding moiety; (ii) the second polypeptide comprising a second portion of the first TCRβV-binding moiety; (iii) the third polypeptide comprising a first portion of a second TCRβV-binding moiety and a second dimerization module linked to the first portion of the second TCRβV-binding moiety; and (iv) the fourth polypeptide comprising a second portion of the second TCRβV-binding moiety; and wherein the first cytokine polypeptide or a functional fragment or a functional variant thereof is covalently linked to the C-terminus of the second polypeptide, and the second cytokine polypeptide or a functional fragment or a functional variant thereof is covalently linked to the C-terminus of the fourth polypeptide.

[0608] Described herein, in certain embodiments, is a multifunctional polypeptide molecule comprising a first polypeptide, a second polypeptide, a third polypeptide, a fourth polypeptide, a cytokine polypeptide or a functional fragment or a functional variant thereof, wherein the first polypeptide, the second polypeptide, the third polypeptide, and the fourth polypeptide are non-contiguous, wherein: (i) the first polypeptide comprising a first portion of a first TCRβV-binding moiety and a first dimerization module linked to the first portion of the first TCRβV-binding moiety; (ii) the second polypeptide comprising a second portion of the first TCRβV-binding moiety; (iii) the third polypeptide comprising a first portion of a second TCRβV-binding moiety and a second dimerization module linked to the first portion of the second TCRβV-binding moiety; and (iv) the fourth polypeptide comprising a second portion of the second TCRβV-binding moiety; and wherein the cytokine polypeptide or a functional fragment or a functional variant thereof is covalently linked to the C-terminus of the second polypeptide or the C-terminus of the fourth polypeptide.

[0609] Described herein, in certain embodiments, is a multifunctional polypeptide molecule comprising a first polypeptide, a second polypeptide, a third polypeptide, a fourth polypeptide, a cytokine polypeptide or a functional fragment or a functional variant thereof, wherein the first polypeptide, the second polypeptide, the third polypeptide, and the fourth polypeptide are non-contiguous, wherein: (i) the first polypeptide comprising a first portion of a first TCRβV-binding moiety and a first dimerization module linked to the first portion of the first TCRβV-binding moiety; (ii) the second polypeptide comprising a second portion of the first TCRβV-binding moiety; (iii) the third polypeptide comprising a first portion of a second TCRβV-binding moiety and a second dimerization module linked to the first portion of the second TCRβV-binding moiety; and (iv) the fourth polypeptide comprising a second portion of the second TCRβV-binding moiety; and wherein the cytokine polypeptide or a functional fragment or a functional variant thereof is covalently linked to the C-terminus of the first polypeptide or the C-terminus of the third polypeptide.

[0610] Described herein, in certain embodiments, is a multifunctional polypeptide molecule comprising a first polypeptide, a second polypeptide, a third polypeptide, and a cytokine polypeptide or a functional fragment or a functional variant thereof, wherein the first polypeptide, the second polypeptide, and the third polypeptide are non-contiguous, wherein: (i) the first polypeptide comprising a first portion of a first TCRβV-binding moiety and a first dimerization module linked to the first portion of the first TCRβV-binding moiety; (ii) the second polypeptide comprising a second portion of the first TCRβV-binding moiety; and (iii) the third polypeptide comprising a second dimerization module; wherein the at least one cytokine polypeptide or a functional fragment or a functional variant thereof is covalently linked to the N terminus of the third polypeptide; and wherein the multifunctional polypeptide molecule does not comprise an additional TCRβV-binding moiety except the first TCRβV-binding moiety.

[0611] In some embodiments, the first portion of the first TCRβV-binding moiety comprises a first VH and a first CH1 linked to the first VH. In some embodiments, the first CH1 is linked to the C-terminus of the first VH.

[0612] In some embodiments, the second portion of the first TCRβV-binding moiety comprises a first VL and a first CL linked to the first VL. In some embodiments, first CL is linked to the C-terminus of the first VL.

[0613] In some embodiments, the first dimerization module is linked to the first portion of the first TCRβV-binding moiety. In some embodiments, the first dimerization module is linked to the C-terminus of the first portion of the first TCRβV-binding moiety. In some embodiments, the first portion of the second TCRβV-binding moiety comprises a second VH and a second CH1 linked to the second VH. In some embodiments, the second CH1 is linked to the C-terminus of the second VH. In some embodiments, the second portion of the second TCRβV-binding moiety comprises a second VL and a second CL linked to the second VL. In some embodiments, the second CL is linked to the C-terminus of the second VL. In some embodiments, the second dimerization module is linked to the first portion of the second TCRβV-binding moiety. In some embodiments, the second dimerization module is linked to the C-terminus of the first portion of the second TCRβV-binding moiety.

[0614] In some embodiments, the multifunctional polypeptide molecule as described herein further comprises a linker between the first portion of the first TCRβV-binding moiety and the first dimerization module, a linker between the first portion of the second TCRβV-binding moiety and the second dimerization module, a linker between the first VH and the first CH1, a linker between the first VL and the first CL, a linker between the second VH and the second CH1, a linker between the second VL and the second CL, a linker between the at least one cytokine polypeptide or a functional fragment or a functional variant thereof and the first polypeptide, a linker between the at least one cytokine polypeptide or a functional fragment or a functional variant thereof and the second polypeptide, a linker between the at least one cytokine polypeptide or a functional fragment or a functional variant thereof and the third polypeptide, a linker between the at least one cytokine polypeptide or a functional fragment or a functional variant thereof and the fourth polypeptide, or a combination thereof. In some embodiments, the multifunctional polypeptide molecule as described herein further comprises a linker between the first portion of the first TCRβV-binding moiety and the first dimerization module, a linker between the first VH and the first CH1, a linker between the first VL and the first CL, a linker between the at least one cytokine polypeptide or a functional fragment or a functional variant thereof and the third polypeptide, or a combination thereof. In some embodiments, linker is selected from the group consisting of a cleavable linker, a non-cleavable linker, a peptide linker, a flexible linker, a rigid linker, a helical linker, and a non-helical linker. In some embodiments, the linker is the peptide linker and wherein the linker is a GS linker. In some embodiments, the linker is the peptide linker and wherein the linker comprises the sequence of SEQ ID NO: 3308 or SEQ ID NO: 3643.

[0615] In some embodiments, the first TCRβV-binding moiety, the second TCRβV-binding moiety, or a combination thereof comprises any one selected from the group consisting of a Fab, F(ab′)2, Fv, a single chain Fv (scFv), a single domain antibody, a diabody (dAb), a camelid antibody and a combination thereof. In some embodiments, the first TCRβV-binding moiety, the second TCRβV-binding moiety, or a combination thereof comprises a scFv or a Fab.

[0616] In some embodiments, the multifunctional polypeptide molecule does not comprise an additional antigen-binding moiety except the TCRβV-binding moiety. In some embodiments, the multifunctional polypeptide molecule further comprise an additional antigen-binding moiety that is not the TCRβV-binding moiety.

[0617] Described herein, in certain embodiments, is a multifunctional polypeptide molecule comprising a first polypeptide, a second polypeptide, and at least one cytokine polypeptide or a functional fragment or a functional variant thereof, wherein the first polypeptide and the second polypeptide are non-contiguous, wherein: (i) the first polypeptide comprising a first TCRβV-binding moiety and a first dimerization module linked to the C-terminus of the first TCRβV-binding moiety, wherein the first TCRβV-binding moiety comprises a first VL and a first VH; and (ii) the second polypeptide comprising a second TCRβV-binding moiety and a second dimerization module linked to the C-terminus of the second TCRβV-binding moiety; wherein the at least one cytokine polypeptide or a functional fragment or a functional variant thereof is covalently linked to the first polypeptide, the second polypeptide, or a combination thereof; wherein the first TCRβV-binding moiety, the second TCRβV-binding moiety, or a combination thereof comprises a scFv; and wherein the multifunctional polypeptide molecule does not comprise an additional antigen-binding moiety except the first TCRβV-binding moiety and the second TCRβV-binding moiety.

[0618] Described herein, in certain embodiments, is a multifunctional polypeptide molecule comprising a first polypeptide, a second polypeptide, and at least one cytokine polypeptide or a functional fragment or a functional variant thereof, wherein the first polypeptide and the second polypeptide are non-contiguous, wherein: (i) the first polypeptide comprising a first TCRβV-binding moiety and a first dimerization module linked to the C-terminus of the first TCRβV-binding moiety, wherein the first TCRβV-binding moiety comprises a first VL and a first VH; and (ii) the second polypeptide comprising a second dimerization module; wherein the at least one cytokine polypeptide or a functional fragment or a functional variant thereof is covalently linked to the first polypeptide, the second polypeptide, or a combination thereof; wherein the first TCRβV-binding moiety comprises a scFv; wherein the multifunctional polypeptide molecule does not comprise an additional antigen-binding moiety except the first TCRβV-binding moiety; and wherein the multifunctional polypeptide molecule does not comprise an additional TCRβV-binding moiety except the first TCRβV-binding moiety.

[0619] In some embodiments, (a) the N-terminus of the first polypeptide is linked to a first cytokine polypeptide or a functional fragment or a functional variant thereof; the C-terminus of the first polypeptide is linked to a second cytokine polypeptide or a functional fragment or a functional variant thereof; or a combination thereof; (b) the N-terminus of the second polypeptide is linked to a third cytokine polypeptide or a functional fragment or a functional variant thereof; the C-terminus of the second polypeptide is linked to a fourth cytokine polypeptide or a functional fragment or a functional variant thereof; or a combination thereof; or (e) a combination thereof.

[0620] In some embodiments, the first cytokine polypeptide, the second cytokine polypeptide, or a combination thereof is within a single contiguous polypeptide chain of the first polypeptide, the third cytokine polypeptide, the fourth cytokine polypeptide, or a combination thereof is within a single contiguous polypeptide chain of the second polypeptide, or a combination thereof.

[0621] In some embodiments, the multifunctional polypeptide molecule as described herein further comprises a linker between the first TCRβV-binding moiety and the first dimerization module, a linker between the second TCRβV-binding moiety and the second dimerization module, a linker between the at least one cytokine polypeptide or a functional fragment or a functional variant thereof and the first polypeptide, a linker between the at least one cytokine polypeptide or a functional fragment or a functional variant thereof and the second polypeptide, or a combination thereof.

[0622] In some embodiments, the multifunctional polypeptide molecule as described herein further comprises a linker between the first TCRβV-binding moiety and the first dimerization module, a linker between the at least one cytokine polypeptide or a functional fragment or a functional variant thereof and the first polypeptide, a linker between the at least one cytokine polypeptide or a functional fragment or a functional variant thereof and the second polypeptide, or a combination thereof. In some embodiments, the linker is selected from the group consisting of a cleavable linker, a non-cleavable linker, a peptide linker, a flexible linker, a rigid linker, a helical linker, and a non-helical linker. In some embodiments, the linker is the peptide linker and wherein the linker is a GS linker. In some embodiments, the linker is the peptide linker and wherein the linker comprises the sequence of SEQ ID NO: 3308 or SEQ ID NO: 3643.

[0623] In some embodiments, the multifunctional polypeptide molecule comprises at least two of the cytokine polypeptide. In some embodiments, the multifunctional polypeptide molecule comprises at least three of the cytokine polypeptide. In some embodiments, the multifunctional polypeptide molecule comprises at least four of the cytokine polypeptide. In some embodiments, the multifunctional polypeptide molecule comprises at least five of the cytokine polypeptide. In some embodiments, the multifunctional polypeptide molecule comprises at least six of the cytokine polypeptide. In some embodiments, the multifunctional polypeptide molecule comprises at least seven of the cytokine polypeptide. In some embodiments, the multifunctional polypeptide molecule comprises at least eight of the cytokine polypeptide. In some embodiments, the multifunctional polypeptide molecule comprises two of the cytokine polypeptide. In some embodiments, the multifunctional polypeptide molecule comprises three of the cytokine polypeptide. In some embodiments, the multifunctional polypeptide molecule comprises four of the cytokine polypeptide. In some embodiments, the multifunctional polypeptide molecule comprises five of the cytokine polypeptide. In some embodiments, the multifunctional polypeptide molecule comprises six of the cytokine polypeptide. In some embodiments, the multifunctional polypeptide molecule comprises seven of the cytokine polypeptide. In some embodiments, the multifunctional polypeptide molecule comprises eight of the cytokine polypeptide. In some embodiments, the multifunctional polypeptide molecule comprises two of the cytokine polypeptide, each of which is linked to the first polypeptide and the second polypeptide; the first polypeptide and the third polypeptide; the first polypeptide and the fourth polypeptide; the second and the third polypeptide; the second polypeptide and the fourth polypeptide; or the third polypeptide and the fourth polypeptide, respectively. In some embodiments, the multifunctional polypeptide molecule comprises three of the cytokine polypeptide, each of which is linked to the first polypeptide, the second polypeptide, and the third polypeptide; the first polypeptide, the second polypeptide, and the fourth polypeptide; the first polypeptide, the third polypeptide, and the fourth polypeptide; or the second polypeptide, the third polypeptide, and the fourth polypeptide, respectively. In some embodiments, the multifunctional polypeptide molecule comprises four of the cytokine polypeptide, each of which is linked to the first polypeptide, the second polypeptide, the third polypeptide, and the fourth polypeptide, respectively. In some embodiments, the cytokine polypeptide is not linked to the polypeptides that comprise the first TCRβV-binding moiety.

[0624] In some embodiments, the at least one cytokine polypeptide is selected from the group consisting of interleukin-2 (IL-2) or a fragment or a functional fragment or a functional variant thereof, interleukin-7 (IL-7) or a fragment or a functional fragment or a functional variant thereof, interleukin-12 (IL-12) or a fragment or a functional fragment or a functional variant thereof, interleukin-15 (IL-15) or a fragment or a functional fragment or a functional variant thereof, interleukin-18 (IL-18) or a fragment or a functional fragment or a functional variant thereof, interleukin-21 (IL-21) or a fragment or a functional fragment or a functional variant thereof, or interferon gamma or a fragment or a functional fragment or a functional variant thereof, or a combination thereof.

[0625] In some embodiments, the at least one cytokine polypeptide comprises interleukin-2 (IL-2) or a fragment thereof. In some embodiments, the at least one cytokine polypeptide is interleukin-2 (IL-2) or a fragment thereof. In some embodiments, the at least one cytokine polypeptide comprises a sequence having at least 75%, 80%, 85%, 90%, 95%, 99%, 99.5%, 99.9%, or 100% sequence identity to the sequence of SEQ ID NO: 2191. In some embodiments, the at least one cytokine polypeptide comprises the sequence of SEQ ID NO: 2191. In some embodiments, the sequence of the at least one cytokine polypeptide is a sequence having at least 75%, 80%, 85%, 90%, 95%, 99%, 99.5%, 99.9%, or 100% sequence identity to the sequence of SEQ ID NO: 2191. In some embodiments, the sequence of the at least one cytokine polypeptide is the sequence of SEQ ID NO: 2191.

[0626] In some embodiments, the variant of the at least one cytokine polypeptide comprises an IL-2 variant comprising a mutation. In some embodiments, the mutation comprises an insertion mutation, a deletion mutation, or a substitution mutation. In some embodiments, the mutation comprises the substitution mutation. In some embodiments, the variant comprises an IL-2 variant comprising C125A mutation. In some embodiments, the variant of the at least one cytokine polypeptide is an IL-2 variant comprising a mutation. In some embodiments, the mutation is an insertion mutation, a deletion mutation, or a substitution mutation. In some embodiments, the mutation is the substitution mutation. In some embodiments, the variant is an IL-2 variant comprising C125A mutation. In some embodiments, the variant comprises a sequence having at least 75%, 80%, 85%, 90%, 95%, 99%, 99.5%, 99.9%, or 100% sequence identity to the sequence of SEQ ID NO: 2270. In some embodiments, the variant comprises the sequence of SEQ ID NO: 2270. In some embodiments, the sequence of the variant is a sequence having at least 75%, 80%, 85%, 90%, 95%, 99%, 99.5%, 99.9%, or 100% sequence identity to the sequence of SEQ ID NO: 2270. In some embodiments, the sequence of the variant is the sequence of SEQ ID NO: 2270.

[0627] In some embodiments, the first dimerization module comprises a first immunoglobulin constant regions (Fc regions) and the second dimerization module comprises a second Fc region. In some embodiments, the first dimerization module is a first immunoglobulin constant regions (Fc regions) and the second dimerization module is a second Fc region.

[0628] In some embodiments, the first Fc region, the second Fc region, or a combination thereof is selected from an IgG1 Fc region or a fragment thereof, an IgG2 Fc region or a fragment thereof, an IgG3 Fc region or a fragment thereof, an IgGA1 Fc region or a fragment thereof, an IgGA2 Fc region or a fragment thereof, an IgG4 Fc region or a fragment thereof, an IgJ Fc region or a fragment thereof, an IgM Fc region or a fragment thereof, an IgD Fc region or a fragment thereof, and an IgE Fc region or a fragment thereof.

[0629] In some embodiments, the first Fc region, the second Fc region, or a combination thereof is selected from a human IgG1 Fc region or a fragment thereof, a human IgG2 Fc region or a fragment thereof, and a human IgG4 Fc region or a fragment thereof.

[0630] In some embodiments, the first Fc region, the second Fc region, or a combination thereof comprises an Fe interface with one or more of: a paired cavity-protuberance, an electrostatic interaction, or a strand-exchange, wherein the dimerization of the first Fc region and the second Fc region is enhanced as indicated by a greater ratio of heteromultimer:homomultimer forms relative to a dimerization of Fc regions with a non-engineered interface. In some embodiments, the dimerization of the first Fc region and the second Fc region is enhanced at least by 1.1 fold, 1.2 fold, 1.3 fold, 1.4 fold, 1.5 fold, 1.6 fold, 1.7 fold, 1.8 fold, 1.9 fold, 2 fold, 3 fold, 4 fold, 5 fold, 6 fold, 7 fold, 8 fold, 9 fold, 10 fold, 15 fold, 20 fold, 25 fold, 30 fold, 35 fold, 40 fold, 45 fold, 50 fold, 55 fold, 60 fold, 65 fold, 70 fold, 75 fold, 80 fold, 85 fold, 90 fold, 95 fold, 100 fold, 150 fold, 200 fold, 250 fold, 300 fold, 250 fold, 400 fold, 450 fold, 500 fold, 550 fold, 600 fold, 650 fold, 700 fold, 750 fold, 800 fold, 850 fold, 900 fold, 950 fold, 1000 fold, 2000 fold, 3000 fold, 4000 fold, 5000 fold, 6000 fold, 7000 fold, 8000 fold, 9000 fold, or 10000 fold relative to a dimerization of Fc regions with a non-engineered interface. In some embodiments, the dimerization of the first Fc region and the second Fc region is enhanced at most by 1.1 fold, 1.2 fold, 1.3 fold, 1.4 fold, 1.5 fold, 1.6 fold, 1.7 fold, 1.8 fold, 1.9 fold, 2 fold, 3 fold, 4 fold, 5 fold, 6 fold, 7 fold, 8 fold, 9 fold, 10 fold, 15 fold, 20 fold, 25 fold, 30 fold, 35 fold, 40 fold, 45 fold, 50 fold, 55 fold, 60 fold, 65 fold, 70 fold, 75 fold, 80 fold, 85 fold, 90 fold, 95 fold, 100 fold, 150 fold, 200 fold, 250 fold, 300 fold, 250 fold, 400 fold, 450 fold, 500 fold, 550 fold, 600 fold, 650 fold, 700 fold, 750 fold, 800 fold, 850 fold, 900 fold, 950 fold, 1000 fold, 2000 fold, 3000 fold, 4000 fold, 5000 fold, 6000 fold, 7000 fold, 8000 fold, 9000 fold, or 10000 fold relative to a dimerization of Fc regions with a non-engineered interface. In some embodiments, the dimerization of the first Fc region and the second Fc region is enhanced by 1.1 fold, 1.2 fold, 1.3 fold, 1.4 fold, 1.5 fold, 1.6 fold, 1.7 fold, 1.8 fold, 1.9 fold, 2 fold, 3 fold, 4 fold, 5 fold, 6 fold, 7 fold, 8 fold, 9 fold, 10 fold, 15 fold, 20 fold, 25 fold, 30 fold, 35 fold, 40 fold, 45 fold, 50 fold, 55 fold, 60 fold, 65 fold, 70 fold, 75 fold, 80 fold, 85 fold, 90 fold, 95 fold, 100 fold, 150 fold, 200 fold, 250 fold, 300 fold, 250 fold, 400 fold, 450 fold, 500 fold, 550 fold, 600 fold, 650 fold, 700 fold, 750 fold, 800 fold, 850 fold, 900 fold, 950 fold, 1000 fold, 2000 fold, 3000 fold, 4000 fold, 5000 fold, 6000 fold, 7000 fold, 8000 fold, 9000 fold, or 10000 fold relative to a dimerization of Fc regions with a non-engineered interface.

[0631] In some embodiments, the first Fc region, the second Fc region, or a combination thereof comprises an amino acid substitution listed in Table 14.

[0632] In some embodiments, the first Fc region, the second Fc region, or a combination thereof comprises an Asn297Ala (N297A) mutation or a Leu234Ala/Leu235Ala (LALA) mutation.

[0633] In some embodiments, the first Fc region, the second Fc region, or a combination thereof comprises a sequence having at least 75%, 80%, 85%, 90%, 95%, 99%, 99.5%, 99.9%, or 100% sequence identity to the sequence of SEQ ID NO: 40, SEQ ID NO: 42, SEQ ID NO: 3645, SEQ ID NO: 3646, SEQ ID NO: 3647, SEQ ID NO:3648, or SEQ ID NO: 3649. In some embodiments, the first Fc region, the second Fc region, or a combination thereof comprises the sequence of SEQ ID NO: 40, SEQ ID NO: 42, SEQ ID NO: 3645, SEQ ID NO: 3646, SEQ ID NO: 3647, SEQ ID NO:3648, or SEQ ID NO: 3649.

[0634] In some embodiments, the sequence of the first Fc region, the second Fc region, or a combination thereof is a sequence having at least 75%, 80%, 85%, 90%, 95%, 99%, 99.5%, 99.9%, or 100% sequence identity to the sequence of SEQ ID NO: 40, SEQ ID NO: 42, SEQ ID NO: 3645, SEQ ID NO: 3646, SEQ ID NO: 3647, SEQ ID NO:3648, or SEQ ID NO: 3649. In some embodiments, the sequence of the first Fc region, the second Fc region, or a combination thereof is the sequence of SEQ ID NO: 40, SEQ ID NO: 42, SEQ ID NO: 3645, SEQ ID NO: 3646, SEQ ID NO: 3647, SEQ ID NO:3648, or SEQ ID NO: 3649.

[0635] In some embodiments, the first TCRβV-binding moiety, the second TCRβV-binding moiety, or a combination thereof binds to one or more of a TCRβV subfamily selected from the group consisting of: (i) TCRβ V2 subfamily comprising TCRβ V2*01; (ii) TCRβ V3 subfamily comprising TCRβ V3-1*01; (iii) TCRβ V4 subfamily comprising one or more selected from TCRβ V4-1, TCRβ V4-2, and TCRβ V4-3; (iv) TCRβ V5 subfamily comprising one or more selected from TCRβ V5-6*01, TCRβ V5-4*01, TCRβ V5-1*01, and TCRβ V5-8*01; (v) the TCRβ V6 subfamily comprising one or more selected from TCRβ V6-4*01, TCRβ V6-4*02, TCRβ V6-9*01, TCRβ V6-8*01, TCRβ V6-5*01, TCRβ V6-6*02, TCRβ V6-6*01, TCRβ V6-2*01, TCRβ V6-3*01, and TCRβ V6-1*01; (vi) TCRβ V9 subfamily; (vii) TCRβ V10 subfamily comprising one or more selected from TCRβ V10-1*01, TCRβ V10-1*02, TCRβ V10-3*01, and TCRβ V10-2*01; (viii) TCRβ V11 subfamily comprising TCRβ V11-2; (ix) TCRβ V12 subfamily comprising one or more selected from TCRβ V12-4*01, TCRβ V12-3*01, and TCRβ V12-5*01; (x) TCRβ V13 subfamily comprising TCRβ V13*01; (xi) TCRβ V16 subfamily comprising TCRβ V16*01; (xii) TCRβ V19 subfamily comprising one or more selected from TCRβ V19*01 and TCRβ V19*02; (xiii) TCRβ V21 subfamily. (xiv) TCRβ V23 subfamily. (xv) TCRβ V27 subfamily; and (xvi) TCRβ V28 subfamily.

[0636] In some embodiments, the first TCRβV-binding moiety and the second TCRβV-binding moiety are same. In some embodiments, the first TCRβV-binding moiety and the second TCRβV-binding moiety are different.

[0637] In some embodiments, the first TCRβV-binding moiety and the second TCRβV-binding moiety binds: (i) one or more of a TCRβ V6 subfamily member and one or more of a TCRβ V10 subfamily member, respectively; (ii) one or more of a TCRβ V6 subfamily member and one or more of a TCRβ V5 subfamily member, respectively; (iii) one or more of a TCRβ V6 subfamily member and one or more of a TCRβ V12 subfamily member, respectively; (iv) one or more of a TCRβ V10 subfamily member and one or more of a TCRβ V5 subfamily member, respectively; (v) one or more of a TCRβ V10 subfamily member and one or more of a TCRβ V12 subfamily member, respectively; or (vi) one or more of a TCRβ V5 subfamily member and one or more of a TCRβ V12 subfamily member, respectively.

[0638] In some embodiments, the first TCRβV-binding moiety, the second TCRβV-binding moiety, or a combination thereof comprises: (i) a HC CDR1, a HC CDR2 and a HC CDR3 of an amino acid sequence having at least 75%, 80%, 85%, 90%, 95%, 99%, 99.5%, 99.9%, or 100% sequence identity to any one of the CDR1, CDR2, and CDR3 sequences listed in Table 1; (ii) a LC CDR1, a LC CDR2, and a LC CDR3 of an amino acid sequence having at least 75%, 80%, 85%, 90%, 95%, 99%, 99.5%, 99.9%, or 100% sequence identity to any one of the CDR1, CDR2, and CDR3 the sequences listed in Table 1; or (iii) a combination thereof. In some embodiments, the first TCRβV-binding moiety, the second TCRβV-binding moiety, or a combination thereof comprises: (i) a HC CDR1, a HC CDR2 and a HC CDR3 having any one of the CDR1, CDR2, and CDR3 sequences listed in Table 1; (ii) a LC CDR1, a LC CDR2, and a LC CDR3 having any one of the CDR1, CDR2, and CDR3 the sequences listed in Table 1; or (iii) a combination thereof.

[0639] In some embodiments, the first TCRβV-binding moiety, the second TCRβV-binding moiety, or a combination thereof comprises: (i) a HC CDR1, a HC CDR2 and a HC CDR3 of an amino acid sequence having at least 75%, 80%, 85%, 90%, 95%, 99%, 99.5%, 99.9%, or 100% sequence identity to any one of the CDR1, CDR2, and CDR3 sequences listed in Table 1, respectively; (ii) a LC CDR1, a LC CDR2, and a LC CDR3 of an amino acid sequence having at least 75%, 80%, 85%, 90%, 95%, 99%, 99.5%, 99.9%, or 100% sequence identity to any one of the CDR1, CDR2, and CDR3 the sequences listed in Table 1, respectively; or (iii) a combination thereof. In some embodiments, the first TCRβV-binding moiety, the second TCRβV-binding moiety, or a combination thereof comprises: (i) a HC CDR1, a HC CDR2 and a HC CDR3 having any one of the CDR1, CDR2, and CDR3 sequences listed in Table 1, respectively; (ii) a LC CDR1, a LC CDR2, and a LC CDR3 having any one of the CDR1, CDR2, and CDR3 the sequences listed in Table 1, respectively; or (iii) a combination thereof.

[0640] In some embodiments, the first TCRβV-binding moiety, the second TCRβV-binding moiety, or a combination thereof comprises: (i) a VH comprising a framework region (FR) comprising a framework 1 (FR1), a framework region 2 (FR2), a framework region 3 (FR3), and a framework region 4 (FR4) that have at least 75%, 80%, 85%, 90%, 95%, 99%, 99.5%, 99.9%, or 100% sequence identity with a non-murine germline FR1, a non-murine germline FR2, a non-murine germline FR3, and a non-murine germline FR4; (ii) a VL comprising a FR comprising a FR1, a FR2, a FR3, and a FR4 that have at least 75%, 80%, 85%, 90%, 95%, 99%, 99.5%, 99.9%, or 100% sequence identity with a non-murine germline FR1, a non-murine germline FR2, a non-murine germline FR3, and a non-murine germline FR4; or (iii) a combination thereof. In some embodiments, the first TCRβV-binding moiety, the second TCRβV-binding moiety, or a combination thereof comprises: (i) a VH comprising a FR comprising a FR1, a FR2, a FR3, and a FR4 having the sequences of a non-murine germline FR1, a non-murine germline FR2, a non-murine germline FR3, and a non-murine germline FR4; (ii) a VL comprising a FR comprising a FR1, a FR2, a FR3, and a FR4 having the sequences of a non-murine germline FR1, a non-murine germline FR2, a non-murine germline FR3, and a non-murine germline FR4; or (iii) a combination thereof.

[0641] In some embodiments, the first TCRβV-binding moiety, the second TCRβV-binding moiety, or a combination thereof comprises: (i) a VH comprising a FR1, a FR2, a FR3, and a FR4 that have at least 75%, 80%, 85%, 90%, 95%, 99%, 99.5%, 99.9%, or 100% sequence identity with a non-murine germline FR1, a non-murine germline FR2, a non-murine germline FR3, and a non-murine germline FR4, respectively; (ii) a VL comprising a FR comprising a FR1, a FR2, a FR3, and a FR4 that have at least 75%, 80%, 85%, 90%, 95%, 99%, 99.5%, 99.9%, or 100% sequence identity with a non-murine germline FR1, a non-murine germline FR2, a non-murine germline FR3, and a non-murine germline FR4, respectively; or (iii) a combination thereof. In some embodiments, the first TCRβV-binding moiety, the second TCRβV-binding moiety, or a combination thereof comprises: (i) a VH comprising a FR comprising a FR1, a FR2, a FR3, and a FR4 having the sequences of a non-murine germline FR1, a non-murine germline FR2, a non-murine germline FR3, and a non-murine germline FR4, respectively; (ii) a VL comprising a FR comprising a FR1, a FR2, a FR3, and a FR4 having the sequences of a non-murine germline FR1, a non-murine germline FR2, a non-murine germline FR3, and a non-murine germline FR4, respectively; or (iii) a combination thereof.

[0642] In some embodiments, the VH comprises the FR3 comprising (i) a Threonine at position 73 according to Kabat numbering; (ii) a Glycine a position 94 according to Kabat numbering; or (iii) a combination thereof. In some embodiments, the VL comprises the FR1 comprising a Phenyalanine at position 10 according to Kabat numbering. In some embodiments, the VL comprises the FR2 comprising (i) a Histidine at position 36 according to Kabat numbering; (ii) an Alanine at position 46 according to Kabat numbering; or (iii) a combination thereof. In some embodiments, the VL comprises the FR3 comprising a Phenyalanine at position 87 according to Kabat numbering.

[0643] In some embodiments, the first TCRβV-binding moiety, the second TCRβV-binding moiety, or a combination thereof comprises: (i) a HC CDR1, a HC CDR2 and a HC CDR3 of an amino acid sequence having at least 75%, 80%, 85%, 90%, 95%, 99%, 99.5%, 99.9%, or 100% sequence identity to any one of the CDR1, CDR2, and CDR3 sequences listed in Table 2; (ii) a LC CDR1, a LC CDR2, and a LC CDR3 of an amino acid sequence having at least 75%, 80%, 85%, 90%, 95%, 99%, 99.5%, 99.9%, or 100% sequence identity to any one of the CDR1, CDR2, and CDR3 sequences listed in Table 2; or (iii) a combination thereof. In some embodiments, the first TCRβV-binding moiety, the second TCRβV-binding moiety, or a combination thereof comprises: (i) a HC CDR1, a HC CDR2 and a HC CDR3 having any one of the CDR1, CDR2, and CDR3 sequences listed in Table 2; (ii) a LC CDR1, a LC CDR2, and a LC CDR3 having any one of the CDR1, CDR2, and CDR3 sequences listed in Table 2; or (iii) a combination thereof.

[0644] In some embodiments, the first TCRβV-binding moiety, the second TCRβV-binding moiety, or a combination thereof comprises: (i) a HC CDR1, a HC CDR2 and a HC CDR3 of an amino acid sequence having at least 75%, 80%, 85%, 90%, 95%, 99%, 99.5%, 99.9%, or 100% sequence identity to any one of the CDR1, CDR2, and CDR3 sequences listed in Table 2, respectively; (ii) a LC CDR1, a LC CDR2, and a LC CDR3 of an amino acid sequence having at least 75%, 80%, 85%, 90%, 95%, 99%, 99.5%, 99.9%, or 100% sequence identity to any one of the CDR1, CDR2, and CDR3 sequences listed in Table 2, respectively; or (iii) a combination thereof. In some embodiments, the first TCRβV-binding moiety, the second TCRβV-binding moiety, or a combination thereof comprises: (i) a HC CDR1, a HC CDR2 and a HC CDR3 having any one of the CDR1, CDR2, and CDR3 sequences listed in Table 2, respectively; (ii) a LC CDR1, a LC CDR2, and a LC CDR3 having any one of the CDR1, CDR2, and CDR3 sequences listed in Table 2, respectively; or (iii) a combination thereof.

[0645] In some embodiments, the first TCRβV-binding moiety, the second TCRβV-binding moiety, or a combination thereof comprises: (i) a VH comprising a FR comprising a FR1, a FR2, a FR3, and a FR4 that have at least 75%, 80%, 85%, 90%, 95%, 99%, 99.5%, 99.9%, or 100% sequence identity with a FR1, a FR2, a FR3, and a FR4 of a humanized B-H LC of Table 2; (ii) a VL comprising a FR comprising a FR1, a FR2, a FR3, and a FR4 that have at least 75%, 80%, 85%, 90%, 95%, 99%, 99.5%, 99.9%, or 100% sequence identity with a FR1, a FR2, a FR3, and a FR4 of a humanized B-H LC of Table 2; or (iii) a combination thereof. In some embodiments, the first TCRβV-binding moiety, the second TCRβV-binding moiety, or a combination thereof comprises: (i) a VH comprising a FR comprising a FR1, a FR2, a FR3, and a FR4 that have the sequence of a FR1, a FR2, a FR3, and a FR4 of a humanized B-H LC of Table 2; (ii) a VL comprising a FR comprising a FR1, a FR2, a FR3, and a FR4 that have the sequence of a FR1, a FR2, a FR3, and a FR4 of a humanized B-H LC of Table 2; or (iii) a combination thereof.

[0646] In some embodiments, the first TCRβV-binding moiety, the second TCRβV-binding moiety, or a combination thereof comprises: (i) a VH comprising a FR comprising a FR1, a FR2, a FR3, and a FR4 that have at least 75%, 80%, 85%, 90%, 95%, 99%, 99.5%, 99.9%, or 100% sequence identity with a FR1, a FR2, a FR3, and a FR4 of a humanized B-H LC of Table 2, respectively; (ii) a VL comprising a FR comprising a FR1, a FR2, a FR3, and a FR4 that have at least 75%, 80%, 85%, 90%, 95%, 99%, 99.5%, 99.9%, or 100% sequence identity with a FR1, a FR2, a FR3, and a FR4 of a humanized B-H LC of Table 2, respectively; or (iii) a combination thereof. In some embodiments, the first TCRβV-binding moiety, the second TCRβV-binding moiety, or a combination thereof comprises: (i) a VH comprising a FR comprising a FR1, a FR2, a FR3, and a FR4 that have the sequence of a FR1, a FR2, a FR3, and a FR4 of a humanized B-H LC of Table 2, respectively; (ii) a VL comprising a FR comprising a FR1, a FR2, a FR3, and a FR4 that have the sequence of a FR1, a FR2, a FR3, and a FR4 of a humanized B-H LC of Table 2, respectively; or (iii) a combination thereof.

[0647] In some embodiments, the first TCRβV-binding moiety, the second TCRβV-binding moiety, or a combination thereof comprises: (i) a VH comprising a sequence having at least 75%, 80%, 85%, 90%, 95%, 99%, 99.5%, 99.9%, or 100% sequence identity to the VH sequence of a humanized Antibody B-H listed in Table 2; (ii) a VL comprising a sequence having at least at least 75%, 80%, 85%, 90%, 95%, 99%, 99.5%, 99.9%, or 100% sequence identity to the VL sequence of a humanized Antibody B-H listed in Table 2; or (iii) a combination thereof. In some embodiments, the first TCRβV-binding moiety, the second TCRβV-binding moiety, or a combination thereof comprises: (i) a VH comprising the VH sequence of a humanized Antibody B-H listed in Table 2; (ii) a VL comprising the VL sequence of a humanized Antibody B-H listed in Table 2; or (iii) a combination thereof. In some embodiments, the first TCRβV-binding moiety, the second TCRβV-binding moiety, or a combination thereof comprises: (i) the VH of a humanized Antibody B-H listed in Table 2; (ii) the VL sequence of a humanized Antibody B-H listed in Table 2; or (iii) a combination thereof.

[0648] In some embodiments, the first polypeptide, the second polypeptide, the third polypeptide, the fourth polypeptide, or a combination thereof comprises a heavy chain constant region having a sequence having at least 75%, 80%, 85%, 90%, 95%, 99%, 99.5%, 99.9%, or 100% sequence identity to any one of the sequences listed in Table 3 or a combination thereof. In some embodiments, the first polypeptide, the second polypeptide, the third polypeptide, the fourth polypeptide, or a combination thereof comprises a heavy chain constant region having any one of the sequences listed in Table 3 or a combination thereof. In some embodiments, the first polypeptide, the second polypeptide, the third polypeptide, the fourth polypeptide, or a combination thereof comprises a heavy chain constant region of which sequence is a sequence having at least 75%, 80%, 85%, 90%, 95%, 99%, 99.5%, 99.9%, or 100% sequence identity to any one of the sequences listed in Table 3 or a combination thereof. In some embodiments, the first polypeptide, the second polypeptide, the third polypeptide, the fourth polypeptide, or a combination thereof comprises a heavy chain constant region having any one of the heavy chain constant region sequences listed in Table 3 or a combination thereof. In some embodiments, the first polypeptide, the second polypeptide, the third polypeptide, the fourth polypeptide, or a combination thereof comprises a heavy chain constant region of an IgM or a fragment thereof. In some embodiments, the heavy chain constant region of the IgM comprises a sequence having at least 75%, 80%, 85%, 90%, 95%, 99%, 99.5%, 99.9%, or 100% sequence identity to the sequence of SEQ ID NO: 73. In some embodiments, the heavy chain constant region of the IgM comprises the sequence of SEQ ID NO: 73. In some embodiments, the sequence of the heavy chain constant region of the IgM is the sequence of SEQ ID NO: 73.

[0649] In some embodiments, the first polypeptide, the second polypeptide, the third polypeptide, the fourth polypeptide, or a combination thereof comprises a heavy chain constant region of an IgJ or a fragment thereof. In some embodiments, the heavy chain constant region of the IgJ comprises a sequence having at least 75%, 80%, 85%, 90%, 95%, 99%, 99.5%, 99.9%, or 100% sequence identity to the sequence of SEQ ID NO: 76. In some embodiments, the heavy chain constant region of the IgJ comprises the sequence of SEQ ID NO: 76. In some embodiments, the sequence of the heavy chain constant region of the IgJ is the sequence of SEQ ID NO: 76.

[0650] In some embodiments, the first polypeptide, the second polypeptide, the third polypeptide, the fourth polypeptide, or a combination thereof comprises a heavy chain constant region of an IgGA1 or a fragment thereof. In some embodiments, the heavy chain constant region of the IgGA1 comprises a sequence having at least 75%, 80%, 85%, 90%, 95%, 99%, 99.5%, 99.9%, or 100% sequence identity to the sequence of SEQ ID NO: 74. In some embodiments, the heavy chain constant region of the IgGA1 comprises the sequence of SEQ ID NO: 74. In some embodiments, the sequence of the heavy chain constant region of the IgGA1 is the sequence of SEQ ID NO: 74.

[0651] In some embodiments, the first polypeptide, the second polypeptide, the third polypeptide, the fourth polypeptide, or a combination thereof comprises a heavy chain constant region of an IgGA2 or a fragment thereof. In some embodiments, the heavy chain constant region of the IgGA2 comprises a sequence having at least 75%, 80%, 85%, 90%, 95%, 99%, 99.5%, 99.9%, or 100% sequence identity to the sequence of SEQ ID NO: 75. In some embodiments, the heavy chain constant region of the IgGA2 comprises the sequence of SEQ ID NO: 75. In some embodiments, the sequence of the heavy chain constant region of the IgGA2 is the sequence of SEQ ID NO: 75.

[0652] In some embodiments, the first polypeptide, the second polypeptide, the third polypeptide, the fourth polypeptide, or a combination thereof comprises a heavy chain constant region of an IgG1 or a fragment thereof. In some embodiments, the heavy chain constant region of the IgG1 comprises a sequence having at least 75%, 80%, 85%, 90%, 95%, 99%, 99.5%, 99.9%, or 100% sequence identity to the sequence of SEQ ID NO: 41. In some embodiments, the heavy chain constant region of the IgG1 comprises the sequence of SEQ ID NO: 41. In some embodiments, the sequence of the heavy chain constant region of the IgG1 is the sequence of SEQ ID NO: 41. In some embodiments, the heavy chain constant region of the IgG1 comprises a sequence having at least 75%, 80%, 85%, 90%, 95%, 99%, 99.5%, 99.9%, or 100% sequence identity to the sequence of SEQ ID NO: 3645. In some embodiments, the heavy chain constant region of the IgG1 comprises the sequence of SEQ ID NO: 3645. In some embodiments, the sequence of the heavy chain constant region of the IgG1 is the sequence of SEQ ID NO: 3645.

[0653] In some embodiments, the first polypeptide, the second polypeptide, the third polypeptide, the fourth polypeptide, or a combination thereof comprises a light chain constant region having a sequence having at least 75%, 80%, 85%, 90%, 95%, 99%, 99.5%, 99.9%, or 100% sequence identity to any one of the sequences listed in Table 3 or a combination thereof. In some embodiments, the first polypeptide, the second polypeptide, the third polypeptide, the fourth polypeptide, or a combination thereof comprises a light chain constant region having any one of the sequences listed in Table 3 or a combination thereof. In some embodiments, the first polypeptide, the second polypeptide, the third polypeptide, the fourth polypeptide, or a combination thereof comprises a light chain constant region having any one of the light chain constant region sequences listed in Table 3 or a combination thereof.

[0654] In some embodiments, the first polypeptide, the second polypeptide, the third polypeptide, the fourth polypeptide, or a combination thereof comprises a light chain constant region of a kappa chain or a fragment thereof. In some embodiments, the light chain constant region of a kappa chain comprises a light chain constant region sequence listed in Table 3.

[0655] In some embodiments, the light chain constant region of a kappa chain comprises a sequence having at least 75%, 80%, 85%, 90%, 95%, 99%, 99.5%, 99.9%, or 100% sequence identity to the sequence of SEQ ID NO: 39 or SEQ ID NO: 3644. In some embodiments, the light chain constant region of a kappa chain comprises the sequence of SEQ ID NO: 39 or SEQ ID NO: 3644. In some embodiments, the sequence of the light chain constant region of a kappa chain is a sequence having at least 75%, 80%, 85%, 90%, 95%, 99%, 99.5%, 99.9%, or 100% sequence identity to the sequence of SEQ ID NO: 39 or SEQ ID NO: 3644. In some embodiments, the sequence of the light chain constant region of a kappa chain is the sequence of SEQ ID NO: 39 or SEQ ID NO: 3644.

[0656] In some embodiments, the first TCRβV-binding moiety, the second TCRβV-binding moiety, or a combination thereof comprises: (i) a HC CDR1, a HC CDR2 and a HC CDR3 comprising amino acid sequences having at least 75%, 80%, 85%, 90%, 95%, 99%, 99.5%, 99.9%, or 100% sequence identity to CDR1, CDR2, and CDR3 sequences of a VH disclosed in Tables 1, 2, 10, 11, 12 or 13; (ii) a LC CDR1, a LC CDR2, and a LC CDR3 comprising an amino acid sequence having at least 75%, 80%, 85%, 90%, 95%, 99%, 99.5%, 99.9%, or 100% sequence identity to CDR1, CDR2, and CDR3 sequences of a VL disclosed in Tables 1, 2, 10, 11, 12 or 13; or (iii) a combination thereof. In some embodiments, the first TCRβV-binding moiety, the second TCRβV-binding moiety, or a combination thereof comprises: (i) a HC CDR1, a HC CDR2 and a HC CDR3 comprising the CDR1, CDR2, and CDR3 sequences of a VH disclosed in Tables 1, 2, 10, 11, 12 or 13; (ii) a LC CDR1, a LC CDR2, and a LC CDR3 comprising the CDR1, CDR2, and CDR3 sequences of a VL disclosed in Tables 1, 2, 10, 11, 12 or 13; or (iii) a combination thereof. In some embodiments, the first TCRβV-binding moiety, the second TCRβV-binding moiety, or a combination thereof comprises: (i) a HC CDR1, a HC CDR2 and a HC CDR3 comprising amino acid sequences having at least 75%, 80%, 85%, 90%, 95%, 99%, 99.5%, 99.9%, or 100% sequence identity to CDR1, CDR2, and CDR3 sequences of a VH disclosed in Tables 1, 2, 10, 11, 12 or 13, respectively; (ii) a LC CDR1, a LC CDR2, and a LC CDR3 comprising an amino acid sequence having at least 75%, 80%, 85%, 90%, 95%, 99%, 99.5%, 99.9%, or 100% sequence identity to CDR1, CDR2, and CDR3 sequences of a VL disclosed in Tables 1, 2, 10, 11, 12 or 13, respectively; or (iii) a combination thereof. In some embodiments, the first TCRβV-binding moiety, the second TCRβV-binding moiety, or a combination thereof comprises: (i) a HC CDR1, a HC CDR2 and a HC CDR3 comprising the CDR1, CDR2, and CDR3 sequences of a VH disclosed in Tables 1, 2, 10, 11, 12 or 13, respectively; (ii) a LC CDR1, a LC CDR2, and a LC CDR3 comprising the CDR1, CDR2, and CDR3 sequences of a VL disclosed in Tables 1, 2, 10, 11, 12 or 13, respectively; or (iii) a combination thereof. In some embodiments, the first TCRβV-binding moiety, the second TCRβV-binding moiety, or a combination thereof comprises: (i) a HC CDR1, a HC CDR2 and a HC CDR3 of a VH disclosed in Tables 1, 2, 10, 11, 12 or 13; (ii) a LC CDR1, a LC CDR2, and a LC CDR3 of a VL disclosed in Tables 1, 2, 10, 11, 12 or 13; or (iii) a combination thereof.

[0657] In some embodiments, the first TCRβV-binding moiety, the second TCRβV-binding moiety, or a combination thereof comprises a light chain comprising a FR1 comprising: (i) an Aspartic Acid at position 1 according to Kabat numbering; (ii) an Asparagine at position 2 according to Kabat numbering; (iii) a Leucine at position 4 according to Kabat numbering; or (iv) a combination thereof.

[0658] In some embodiments, the first TCRβV-binding moiety, the second TCRβV-binding moiety, or a combination thereof comprises a light chain comprising a FR3 comprising: (i) a Glycine at position 66 according to Kabat numbering; (ii) an Asparagine at position 69 according to Kabat numbering; (iii) a Tyrosine at position 71 according to Kabat numbering; or (iv) a combination thereof

[0659] In some embodiments, the first TCRβV-binding moiety, the second TCRβV-binding moiety, or a combination thereof binds to an outward facing region on a TCRβV protein. In some embodiments, the outward facing region on the TCRβV protein comprises a structurally conserved region of TCRβV having a similar structure across one or more TCRβV subfamilies.

### Cytokine Molecules

[0660] In some embodiments, the multifunctional molecule includes a cytokine molecule. As used herein, a “cytokine molecule” or a “cytokine polypeptide” as interchangeably used herein, refers to full length, a fragment or a variant of a cytokine; a cytokine further comprising a receptor domain, e.g., a cytokine receptor dimerizing domain; or an agonist of a cytokine receptor, e.g., an antibody molecule (e.g., an agonistic antibody) to a cytokine receptor, that elicits at least one activity of a naturally-occurring cytokine. In some embodiments the cytokine molecule is chosen from interleukin-2 (IL-2), interleukin-7 (IL-7), interleukin-12 (IL-12), interleukin-10 (IL-10), interleukin-15 (IL-15), interleukin-18 (IL-18), interleukin-21 (IL-21), or interferon gamma, or a fragment or variant thereof, or a combination of any of the aforesaid cytokines. The cytokine molecule can be a monomer or a dimer. In embodiments, the cytokine molecule can further include a cytokine receptor dimerizing domain. In other embodiments, the cytokine molecule is an agonist of a cytokine receptor, e.g., an antibody molecule (e.g., an agonistic antibody) to a cytokine receptor chosen from an IL-15Ra or IL-21R.

[0661] Cytokines are generally polypeptides that influence cellular activity, for example, through signal transduction pathways. Accordingly, a cytokine of the multispecific or multifunctional polypeptide is useful and can be associated with receptor-mediated signaling that transmits a signal from outside the cell membrane to modulate a response within the cell. Cytokines are proteinaceous signaling compounds that are mediators of the immune response. They control many different cellular functions including proliferation, differentiation and cell survival/apoptosis; cytokines are also involved in several pathophysiological processes including viral infections and autoimmune diseases. Cytokines are synthesized under various stimuli by a variety of cells of both the innate (monocytes, macrophages, dendritic cells) and adaptive (T- and B-cells) immune systems. Cytokines can be classified into two groups: pro- and anti-inflammatory. Pro-inflammatory cytokines, including IFNγ, IL-1, IL-6 and TNF-alpha, are predominantly derived from the innate immune cells and Th1 cells. Anti-inflammatory cytokines, including IL-10, IL-4, IL-13 and IL-5, are synthesized from Th2 immune cells.

[0662] Provided herein are, inter alia, multispecific (e.g., bi-, tri-, quad-specific) or multifunctional molecules, that include, e.g., are engineered to contain, one or more cytokine molecules, e.g., immunomodulatory (e.g., proinflammatory) cytokines and variants, e.g., functional variants, thereof. Accordingly, in some embodiments, the cytokine molecule is an interleukin or a variant, e.g., a functional variant thereof. In some embodiments the interleukin is a proinflammatory interleukin. In some embodiments the interleukin is chosen from interleukin-2 (IL-2), interleukin-12 (IL-12), interleukin-15 (IL-15), interleukin-18 (IL-18), interleukin-21 (IL-21), interleukin-7 (IL-7), or interferon gamma. In some embodiments, the cytokine molecule is a proinflammatory cytokine.

[0663] In certain embodiments, the cytokine is a single chain cytokine. In certain embodiments, the cytokine is a multichain cytokine (e.g., the cytokine comprises 2 or more (e.g., 2) polypeptide chains. An exemplary multichain cytokine is IL-12.

[0664] Examples of useful cytokines include, but are not limited to, GM-CSF, IL-1α, IL-1β, IL-2, IL-3, IL-4, IL-5, IL-6, IL-7, IL-8, IL-10, IL-12, IL-21, IFN-α, IFN-3, IFN-γ, MIP-1α, MIP-1β, TGF-β, TNF-α, and TNFβ. In some embodiments the cytokine of the multispecific or multifunctional polypeptide is a cytokine selected from the group of GM-CSF, IL-2, IL-7, IL-8, IL-10, IL-12, IL-15, IL-21, IFN-α, IFN-γ, MIP-1α, MIP-1β and TGF-β. In some embodiments the cytokine of the i the multispecific or multifunctional polypeptide is a cytokine selected from the group of IL-2, IL-7, IL-10, IL-12, IL-15, IFN-α, and IFN-γ. In certain embodiments the cytokine is mutated to remove N- and/or O-glycosylation sites. Elimination of glycosylation increases homogeneity of the product obtainable in recombinant production.

[0665] In some embodiments, the cytokine of the multispecific or multifunctional polypeptide is IL-2. In a specific embodiment, the IL-2 cytokine can elicit one or more of the cellular responses selected from the group consisting of: proliferation in an activated T lymphocyte cell, differentiation in an activated T lymphocyte cell, cytotoxic T cell (CTL) activity, proliferation in an activated B cell, differentiation in an activated B cell, proliferation in a natural killer (NK) cell, differentiation in a NK cell, cytokine secretion by an activated T cell or an NK cell, and NK/lymphocyte activated killer (LAK) antitumor cytotoxicity. In another particular embodiment the IL-2 cytokine is a mutant IL-2 cytokine having reduced binding affinity to the .alpha.-subunit of the IL-2 receptor. Together with the .beta.- and .gamma.-subunits (also known as CD122 and CD132, respectively), the .alpha.-subunit (also known as CD25) forms the heterotrimeric high-affinity IL-2 receptor, while the dimeric receptor consisting only of the β- and γ-subunits is termed the intermediate-affinity IL-2 receptor. As described in PCT patent application number PCT/EP2012/051991, which is incorporated herein by reference in its entirety, a mutant IL-2 polypeptide with reduced binding to the .alpha.-subunit of the IL-2 receptor has a reduced ability to induce IL-2 signaling in regulatory T cells, induces less activation-induced cell death (AICD) in T cells, and has a reduced toxicity profile in vivo, compared to a wild-type IL-2 polypeptide. The use of such an cytokine with reduced toxicity is particularly advantageous in a multispecific or multifunctional polypeptide according to the invention, having a long serum half-life due to the presence of an Fc domain. In some embodiments, the mutant IL-2 cytokine of the multispecific or multifunctional polypeptide according to the invention comprises at least one amino acid mutation that reduces or abolishes the affinity of the mutant IL-2 cytokine to the .alpha.-subunit of the IL-2 receptor (CD25) but preserves the affinity of the mutant IL-2 cytokine to the intermediate-affinity IL-2 receptor (consisting of the β and γ subunits of the IL-2 receptor), compared to the non-mutated IL-2 cytokine. In some embodiments the one or more amino acid mutations are amino acid substitutions. In a specific embodiment, the mutant IL-2 cytokine comprises one, two or three amino acid substitutions at one, two or three position(s) selected from the positions corresponding to residue 42, 45, and 72 of human IL-2. In a more specific embodiment, the mutant IL-2 cytokine comprises three amino acid substitutions at the positions corresponding to residue 42, 45 and 72 of human IL-2. In an even more specific embodiment, the mutant IL-2 cytokine is human IL-2 comprising the amino acid substitutions F42A, Y45A and L72G. In some embodiments the mutant IL-2 cytokine additionally comprises an amino acid mutation at a position corresponding to position 3 of human IL-2, which eliminates the O-glycosylation site of IL-2. Particularly, said additional amino acid mutation is an amino acid substitution replacing a threonine residue by an alanine residue. A particular mutant IL-2 cytokine useful in the invention comprises four amino acid substitutions at positions corresponding to residues 3, 42, 45 and 72 of human IL-2. Specific amino acid substitutions are T3A, F42A, Y45A and L72G. As demonstrated in PCT patent application number PCT/EP2012/051991 and in the appended Examples, said quadruple mutant IL-2 polypeptide (IL-2 qm) exhibits no detectable binding to CD25, reduced ability to induce apoptosis in T cells, reduced ability to induce IL-2 signaling in T.sub.reg cells, and a reduced toxicity profile in vivo. However, it retains ability to activate IL-2 signaling in effector cells, to induce proliferation of effector cells, and to generate IFN-γ as a secondary cytokine by NK cells.

[0666] The IL-2 or mutant IL-2 cytokine according to any of the above embodiments may comprise additional mutations that provide further advantages such as increased expression or stability. For example, the cysteine at position 125 may be replaced with a neutral amino acid such as alanine, to avoid the formation of disulfide-bridged IL-2 dimers. Thus, in certain embodiments the IL-2 or mutant IL-2 cytokine of the multispecific or multifunctional polypeptide according to the invention comprises an additional amino acid mutation at a position corresponding to residue 125 of human IL-2. In some embodiments said additional amino acid mutation is the amino acid substitution C125A.

[0667] In a specific embodiment the IL-2 cytokine of the multispecific or multifunctional polypeptide comprises the polypeptide sequence of SEQ ID NO: 2270

[APTSSSTKKTQLQLEHLLLDLQMILNGINNYKNPKLTRMLTFKFYMPK
KATELKHLQCLEEELKPLEEVLNLAQSKNFHLRPRDLISNINVIVLELK
GSETTFMCEYADETATIVEFLNRWITFAQSIISTLT].

[0668] In another specific embodiment the IL-2 cytokine of the multispecific or multifunctional polypeptide comprises the polypeptide sequence of SEQ ID NO: 2280

[APASSSTKKTQLQLEHLLLDLQMILNGINNYKNPKLTRMLTAKFAMPK
KATELKHLQCLEEELKPLEEVLNGAQSKNFHLRPRDLISNINVIVLELK
GSETTFMCEYADETATIVEFLNRWITFAQSIISTLT].

[0669] In another embodiment the cytokine of the multispecific or multifunctional polypeptide is IL-12. In a specific embodiment said IL-12 cytokine is a single chain IL-12 cytokine. In an even more specific embodiment the single chain IL-12 cytokine comprises the polypeptide sequence of SEQ ID NO: 2290 [IWELKKDVYVVELDWYPDAPGEMVVLTCDTPEEDGITWTLDQSSEVLGSGKTLTIQVKEFGDA GQYTCHKGGEVLSHSLLLLHKKEDGIWSTDILKDQKEPKNKTFLRCEAKNYSGRFTCWWLTTIS TDLTFSVKSSRGSSDPQGVTCGAATLSAERVRGDNKEYEYSVECQEDSACPAAEESLPIEVMVD AVHKLKYENYTSSFFIRDIIKPDPPKNLQLKPLKNSRQVEVSWEYPDTWSTPHSYFSLTFCVQVQ GKSKREKKDRVFTDKTSATVICRKNASISVRAQDRYYSSSWSEWASVPCSGGGGSGGGGSGGG GSRNLPVATPDPGMFPCLHHSQNLLRAVSNMLQKARQTLEFYPCTSEEIDHEDITKDKTSTVEAC LPLELTKNESCLNSRETSFITNGSCLASRKTSFMMALCLSSIYEDLKMYQVEFKTMNAKLLMDPK RQIFLDQNMLAVIDELMQALNFNSETVPQKSSLEEPDFYKTKIKLCILLHAFRIRAVTIDRVMSYL NAS]. In some embodiments, the IL-12 cytokine can elicit one or more of the cellular responses selected from the group consisting of: proliferation in a NK cell, differentiation in a NK cell, proliferation in a T cell, and differentiation in a T cell.

[0670] In another embodiment the cytokine of the multispecific or multifunctional polypeptide is IL-10. In a specific embodiment said IL-10 cytokine is a single chain IL-10 cytokine. In an even more specific embodiment the single chain IL-10 cytokine comprises the polypeptide sequence of SEQ ID NO: 2300

[SPGQGTQSENSCTHFPGNLPNMLRDLRDAFSRVKTFFQMKDQLDNLLL
KESLLEDFKGYLGCQALSEMIQFYLEEVMPQAENQDPDIKAHVNSLGEN
LKTLRLRLRRCHRFLPCENKSKAVEQVKNAFNKLQEKGIYKAMSEFDIF
INYIEAYMTMKIRNGGGGSGGGGSGGGGSGGGGSSPGQGTQSENSCTHF
PGNLPNMLRDLRDAFSRVKTFFQMKDQLDNLLLKESLLEDFKGYLGCQA
LSEMIQFYLEEVMPQAENQDPDIKAHVNSLGENLKTLRLRLRRCHRFLP
CENKSKAVEQVKNAFNKLQEKGIYKAMSEFDIFINYIEAYMTMKIRN].

[0671] In another specific embodiment the IL-10 cytokine is a monomeric IL-10 cytokine. In a more specific embodiment the monomeric IL-10 cytokine comprises the polypeptide sequence of SEQ ID NO: 2310 [SPGQGTQSENSCTHFPGNLPNMLRDLRDAFSRVKTFFQMKDQLDNLLLKESLLEDFKGYLGCQ ALSEMIQFYLEEVMPQAENQDPDIKAHVNSLGENLKTLRLRLRRCHRFLPCENGGGSGGKSKAV EQVKNAFNKLQEKGIYKAMSEFDIFINYIEAYMTMKIRN]. In some embodiments, the IL-10 cytokine can elicit one or more of the cellular responses selected from the group consisting of: inhibition of cytokine secretion, inhibition of antigen presentation by antigen presenting cells, reduction of oxygen radical release, and inhibition of T cell proliferation. A multispecific or multifunctional polypeptide according to the invention wherein the cytokine is IL-10 is particularly useful for downregulation of inflammation, e.g. in the treatment of an inflammatory disorder.

[0672] In another embodiment, the cytokine of the multispecific or multifunctional polypeptide is IL-15. In a specific embodiment said IL-15 cytokine is a mutant IL-15 cytokine having reduced binding affinity to the α-subunit of the IL-15 receptor. Without wishing to be bound by theory, a mutant IL-15 polypeptide with reduced binding to the .alpha.-subunit of the IL-15 receptor has a reduced ability to bind to fibroblasts throughout the body, resulting in improved pharmacokinetics and toxicity profile, compared to a wild-type IL-15 polypeptide. The use of an cytokine with reduced toxicity, such as the described mutant IL-2 and mutant IL-15 effector moieties, is particularly advantageous in a multispecific or multifunctional polypeptide according to the invention, having a long serum half-life due to the presence of an Fc domain. In some embodiments the mutant IL-15 cytokine of the multispecific or multifunctional polypeptide according to the invention comprises at least one amino acid mutation that reduces or abolishes the affinity of the mutant IL-15 cytokine to the .alpha.-subunit of the IL-15 receptor but preserves the affinity of the mutant IL-15 cytokine to the intermediate-affinity IL-15/IL-2 receptor (consisting of the .beta.- and .gamma.-subunits of the IL-15/IL-2 receptor), compared to the non-mutated IL-15 cytokine. In some embodiments the amino acid mutation is an amino acid substitution. In a specific embodiment, the mutant IL-15 cytokine comprises an amino acid substitution at the position corresponding to residue 53 of human IL-15. In a more specific embodiment, the mutant IL-15 cytokine is human IL-15 comprising the amino acid substitution E53A. In some embodiments the mutant IL-15 cytokine additionally comprises an amino acid mutation at a position corresponding to position 79 of human IL-15, which eliminates the N-glycosylation site of IL-15. Particularly, said additional amino acid mutation is an amino acid substitution replacing an asparagine residue by an alanine residue. In an even more specific embodiment the IL-15 cytokine comprises the polypeptide sequence of SEQ ID NO: 2320 [NWVNVISDLKKIEDLIQSMHIDATLYTESDVHPSCKVTAMKCFLLELQVISLASGDASIHDTVEN LIILANNSLSSNGAVTESGCKECEELEEKNIKEFLQSFVHIVQMFINTS]. In some embodiments, the IL-15 cytokine can elicit one or more of the cellular responses selected from the group consisting of: proliferation in an activated T lymphocyte cell, differentiation in an activated T lymphocyte cell, cytotoxic T cell (CTL) activity, proliferation in an activated B cell, differentiation in an activated B cell, proliferation in a natural killer (NK) cell, differentiation in a NK cell, cytokine secretion by an activated T cell or an NK cell, and NK/lymphocyte activated killer (LAK) antitumor cytotoxicity.

[0673] Mutant cytokine molecules useful as effector moieties in the multispecific or multifunctional polypeptide can be prepared by deletion, substitution, insertion or modification using genetic or chemical methods well known in the art. Genetic methods may include site-specific mutagenesis of the encoding DNA sequence, PCR, gene synthesis, and the like. The correct nucleotide changes can be verified for example by sequencing. Substitution or insertion may involve natural as well as non-natural amino acid residues. Amino acid modification includes well known methods of chemical modification such as the addition or removal of glycosylation sites or carbohydrate attachments, and the like.

[0674] In some embodiments, the cytokine, particularly a single-chain cytokine, of the multispecific or multifunctional polypeptide is GM-CSF. In a specific embodiment, the GM-CSF cytokine can elicit proliferation and/or differentiation in a granulocyte, a monocyte or a dendritic cell. In some embodiments, the cytokine, particularly a single-chain cytokine, of the multispecific or multifunctional polypeptide is IFN-α. In a specific embodiment, the IFN-α cytokine can elicit one or more of the cellular responses selected from the group consisting of: inhibiting viral replication in a virus-infected cell, and upregulating the expression of major histocompatibility complex I (MHC I). In another specific embodiment, the IFN-α cytokine can inhibit proliferation in a tumor cell. In some embodiments the cytokine, particularly a single-chain cytokine, of the multispecific or multifunctional polypeptide is IFNγ. In a specific embodiment, the IFN-γ cytokine can elicit one or more of the cellular responses selected from the group of: increased macrophage activity, increased expression of MHC molecules, and increased NK cell activity. In some embodiments the cytokine, particularly a single-chain cytokine, of the multispecific or multifunctional polypeptide is IL-7. In a specific embodiment, the IL-7 cytokine can elicit proliferation of T and/or B lymphocytes. In some embodiments, the cytokine, particularly a single-chain cytokine, of the multispecific or multifunctional polypeptide is IL-8. In a specific embodiment, the IL-8 cytokine can elicit chemotaxis in neutrophils. In some embodiments, the cytokine, particularly a single-chain cytokine, of the multispecific or multifunctional polypeptide, is MIP-1α. In a specific embodiment, the MIP-1α cytokine can elicit chemotaxis in monocytes and T lymphocyte cells. In some embodiments, the cytokine, particularly a single-chain cytokine, of the multispecific or multifunctional polypeptide is MIP-1β. In a specific embodiment, the MIP-1β cytokine can elicit chemotaxis in monocytes and T lymphocyte cells. In some embodiments, the cytokine, particularly a single-chain cytokine, of the multispecific or multifunctional polypeptide is TGF-β. In a specific embodiment, the TGF-β cytokine can elicit one or more of the cellular responses selected from the group consisting of: chemotaxis in monocytes, chemotaxis in macrophages, upregulation of IL-1 expression in activated macrophages, and upregulation of IgA expression in activated B cells.

[0675] In some embodiments, the multispecific or multifunctional polypeptide of the invention binds to an cytokine receptor with a dissociation constant (K_{D}) that is at least about 1, 1.5, 2, 2.5, 3, 3.5, 4, 4.5, 5, 5.5, 6, 6.5, 7, 7.5, 8, 8.5, 9, 9.5 or 10 times greater than that for a control cytokine. In another embodiment, the multispecific or multifunctional polypeptide binds to an cytokine receptor with a K_{D} that is at least 2, 3, 4, 5, 6, 7, 8, 9, or 10 times greater than that for a corresponding multispecific or multifunctional polypeptide comprising two or more effector moieties. In another embodiment, the multispecific or multifunctional polypeptide binds to an cytokine receptor with a dissociation constant K_{D} that is about 10 times greater than that for a corresponding the multispecific or multifunctional polypeptide comprising two or more cytokines.

[0676] In some embodiments, the multispecific molecules as described herein include a cytokine molecule. In embodiments, the cytokine molecule includes a full length, a fragment or a variant of a cytokine; a cytokine receptor domain, e.g., a cytokine receptor dimerizing domain; or an agonist of a cytokine receptor, e.g., an antibody molecule (e.g., an agonistic antibody) to a cytokine receptor.

[0677] In some embodiments the cytokine molecule is chosen from IL-2, IL-12, IL-15, IL-18, IL-7, IL-21, or interferon gamma, or a fragment or variant thereof, or a combination of any of the aforesaid cytokines. The cytokine molecule can be a monomer or a dimer. In embodiments, the cytokine molecule can further include a cytokine receptor dimerizing domain.

[0678] In other embodiments, the cytokine molecule is an agonist of a cytokine receptor, e.g., an antibody molecule (e.g., an agonistic antibody) to a cytokine receptor chosen from an IL-15Ra or IL-21R.

[0679] In some embodiments, the cytokine molecule is IL-15, e.g., human IL-15 (e.g., comprising the amino acid sequence: NWVNVISDLKKIEDLIQSMHIDATLYTESDVHPSCKVTAMKCFLLELQVISLESGDASIHDTVENL IILANNSLSSNGNVTESGCKECEELEEKNIKEFLQSFVHIVQMFINTS (SEQ ID NO: 2170), a fragment thereof, or an amino acid sequence substantially identical thereto (e.g., 95% to 99.9% identical thereto, or having at least one amino acid alteration, but not more than five, ten or fifteen alterations (e.g., substitutions, deletions, or insertions, e.g., conservative substitutions) to the amino acid sequence of SEQ ID NO: 2170.

[0680] In some embodiments, the cytokine molecule comprises a receptor dimerizing domain, e.g., an IL15Ralpha dimerizing domain. In some embodiments, the IL15Ralpha dimerizing domain comprises the amino acid sequence: MAPRRARGCRTLGLPALLLLLLLRPPATRGITCPPPMSVEHADIWVKSYSLYSRERYICNSGFKR KAGTSSLTECVL (SEQ ID NO: 2180), a fragment thereof, or an amino acid sequence substantially identical thereto (e.g., 95% to 99.9% identical thereto, or having at least one amino acid alteration, but not more than five, ten or fifteen alterations (e.g., substitutions, deletions, or insertions, e.g., conservative substitutions) to the amino acid sequence of SEQ ID NO: 2180. In some embodiments, the cytokine molecule (e.g., IL-15) and the receptor dimerizing domain (e.g., an IL15Ralpha dimerizing domain) of the multispecific molecule are covalently linked, e.g., via a linker (e.g., a Gly-Ser linker, e.g., a linker comprising the amino acid sequence SGGSGGGGSGGGSGGGGSLQ (SEQ ID NO: 2190). In other embodiments, the cytokine molecule (e.g., IL-15) and the receptor dimerizing domain (e.g., an IL15Ralpha dimerizing domain) of the multispecific molecule are not covalently linked, e.g., are non-covalently associated.

[0681] In other embodiments, the cytokine molecule is IL-2, e.g., human IL-2 (e.g., comprising the amino acid sequence: APTSSSTKKTQLQLEHLLLDLQMILNGINNYKNPKLTRMLTFKFYMPKKATELKHLQCLEEELKP LEEVLNLAQSKNFHLRPRDLISNINVIVLELKGSETTFMCEYADETATIVEFLNRWITFCQSIISTLT (SEQ ID NO: 2191), a fragment thereof, or an amino acid sequence substantially identical thereto (e.g., 95% to 99.9% identical thereto, or having at least one amino acid alteration, but not more than five, ten or fifteen alterations (e.g., substitutions, deletions, or insertions, e.g., conservative substitutions) to the amino acid sequence of SEQ ID NO:2191).

[0682] In other embodiments, the cytokine molecule is IL-18, e.g., human IL-18 (e.g., comprising the amino acid sequence: YFGKLESKLSVIRNLNDQVLFIDQGNRPLFEDMTDSDCRDNAPRTIFIISMYKDSQPRGMAVTISV KCEKISTLSCENKIISFKEMNPPDNIKDTKSDIIFFQRSVPGHDNKMQFESSSYEGYFLACEKERDL FKLILKKEDELGDRSIMFTVQNED (SEQ ID NO: 2192), a fragment thereof, or an amino acid sequence substantially identical thereto (e.g., 95% to 99.9% identical thereto, or having at least one amino acid alteration, but not more than five, ten or fifteen alterations (e.g., substitutions, deletions, or insertions, e.g., conservative substitutions) to the amino acid sequence of SEQ ID NO: 2192).

[0683] In other embodiments, the cytokine molecule is IL-21, e.g., human IL-21 (e.g., comprising the amino acid sequence: QGQDRHMIRMRQLIDIVDQLKNYVNDLVPEFLPAPEDVETNCEWSAFSCFQKAQLKSANTGNNE RIINVSIKKLKRKPPSTNAGRRQKHRLTCPSCDSYEKKPPKEFLERFKSLLQKMIHQHLSSRTHGS EDS (SEQ ID NO: 2193), a fragment thereof, or an amino acid sequence substantially identical thereto (e.g., 95% to 99.9% identical thereto, or having at least one amino acid alteration, but not more than five, ten or fifteen alterations (e.g., substitutions, deletions, or insertions, e.g., conservative substitutions) to the amino acid sequence of SEQ ID NO: 2193).

[0684] In yet other embodiments, the cytokine molecule is interferon gamma, e.g., human interferon gamma (e.g., comprising the amino acid sequence: QDPYVKEAENLKKYFNAGHSDVADNGTLFLGILKNWKEESDRKIMQSQIVSFYFKLFKNFKDDQ SIQKSVETIKEDMNVKFFNSNKKKRDDFEKLTNYSVTDLNVQRKAIHELIQVMAELSPAAKTGK RKRSQMLFRG (SEQ ID NO: 2194), a fragment thereof, or an amino acid sequence substantially identical thereto (e.g., 95% to 99.9% identical thereto, or having at least one amino acid alteration, but not more than five, ten or fifteen alterations (e.g., substitutions, deletions, or insertions, e.g., conservative substitutions) to the amino acid sequence of SEQ ID NO: 2194).

### Immune Cell Engagers

[0685] In some embodiments, the multifunctional molecule further includes an immune cell engager. “An immune cell engager” refers to one or more binding specificities that bind and/or activate an immune cell, e.g., a cell involved in an immune response. In embodiments, the immune cell is chosen from a T cell, an NK cell, a B cell, a dendritic cell, and/or the macrophage cell. The immune cell engager can be an antibody molecule, a receptor molecule (e.g., a full length receptor, receptor fragment, or fusion thereof (e.g., a receptor-Fc fusion)), or a ligand molecule (e.g., a full length ligand, ligand fragment, or fusion thereof (e.g., a ligand-Fc fusion)) that binds to the immune cell antigen (e.g., the T cell, the NK cell antigen, the B cell antigen, the dendritic cell antigen, and/or the macrophage cell antigen). In embodiments, the immune cell engager specifically binds to the target immune cell, e.g., binds preferentially to the target immune cell. For example, when the immune cell engager is an antibody molecule, it binds to an immune cell antigen (e.g., a T cell antigen, an NK cell antigen, a B cell antigen, a dendritic cell antigen, and/or a macrophage cell antigen) with a dissociation constant of less than about 10 nM.

[0686] The immune cell engagers, e.g., first and/or second immune cell engager, of the multispecific or multifunctional molecules as described herein can mediate binding to, and/or activation of, an immune cell, e.g., an immune effector cell. In some embodiments, the immune cell is chosen from a T cell, an NK cell, a B cell, a dendritic cell, or a macrophage cell engager, or a combination thereof. In some embodiments, the immune cell engager is chosen from one, two, three, or all of a T cell engager, NK cell engager, a B cell engager, a dendritic cell engager, or a macrophage cell engager, or a combination thereof. The immune cell engager can be an agonist of the immune system. In some embodiments, the immune cell engager can be an antibody molecule, a ligand molecule (e.g., a ligand that further comprises an immunoglobulin constant region, e.g., an Fc region), a small molecule, a nucleotide molecule.

### Natural Killer Cell Engagers:

[0687] Natural Killer (NK) cells recognize and destroy tumors and virus-infected cells in an antibody-independent manner. The regulation of NK cells is mediated by activating and inhibiting receptors on the NK cell surface. One family of activating receptors is the natural cytotoxicity receptors (NCRs) which include NKp30, NKp44 and NKp46. The NCRs initiate tumor targeting by recognition of heparan sulfate on cancer cells. NKG2D is a receptor that provides both stimulatory and costimulatory innate immune responses on activated killer (NK) cells, leading to cytotoxic activity. DNAM1 is a receptor involved in intercellular adhesion, lymphocyte signaling, cytotoxicity and lymphokine secretion mediated by cytotoxic T-lymphocyte (CTL) and NK cell. DAP10 (also known as HCST) is a transmembrane adapter protein which associates with KLRK1 to form an activation receptor KLRK1-HCST in lymphoid and myeloid cells; this receptor plays a major role in triggering cytotoxicity against target cells expressing cell surface ligands such as MHC class I chain-related MICA and MICB, and U (optionally L1)6-binding proteins (ULBPs); it KLRK1-HCST receptor plays a role in immune surveillance against tumors and is required for cytolysis of tumors cells; indeed, melanoma cells that do not express KLRK1 ligands escape from immune surveillance mediated by NK cells. CD16 is a receptor for the Fc region of IgG, which binds complexed or aggregated IgG and also monomeric IgG and thereby mediates antibody-dependent cellular cytotoxicity (ADCC) and other antibody-dependent responses, such as phagocytosis.

[0688] In some embodiments, the NK cell engager is a viral hemagglutinin (HA), HA is a glycoprotein found on the surface of influenza viruses. It is responsible for binding the virus to cells with sialic acid on the membranes, such as cells in the upper respiratory tract or erythrocytes. HA has at least 18 different antigens. These subtypes are named H1 through H18. NCRs can recognize viral proteins. NKp46 has been shown to be able to interact with the HA of influenza and the HA-NA of Paramyxovirus, including Sendai virus and Newcastle disease virus. Besides NKp46, NKp44 can also functionally interact with HA of different influenza subtypes.

[0689] Provided herein are, inter alia, multispecific (e.g., bi-, tri-, quad-specific) or multifunctional molecules that are engineered to contain one or more NK cell engagers that mediate binding to and/or activation of an NK cell. Accordingly, in some embodiments, the NK cell engager is selected from an antigen binding domain or ligand that binds to (e.g., activates): NKp30, NKp40, NKp44, NKp46, NKG2D, DNAM1, DAP10, CD16 (e.g., CD16a, CD16b, or both), CRTAM, CD27, PSGL1, CD96, CD100 (SEMA4D), NKp80, CD244 (also known as SLAMF4 or 2B4), SLAMF6, SLAMF7, KIR2DS2, KIR2DS4, KIR3DS1, KIR2DS3, KIR2DS5, KIR2DS1, CD94, NKG2C, NKG2E, or CD160.

[0690] In some embodiments, the NK cell engager is a ligand of NKp30 is a B7-6, e.g., comprises the amino acid sequence of: DLKVEMMAGGTQITPLNDNVTIFCNIFYSQPLNITSMGITWFWKSLTFDKEVKVFEFFGDHQEAF RPGAIVSPWRLKSGDASLRLPGIQLEEAGEYRCEVVVTPLKAQGTVQLEVVASPASRLLLDQVG MKENEDKYMCESSGFYPEAINITWEKQTQKFPHPIEISEDVITGPTIKNMDGTFNVTSCLKLNSSQ EDPGTVYQCVVRHASLHTPLRSNFTLTAARHSLSETEKTDNFS (SEQ ID NO: 3291), a fragment thereof, or an amino acid sequence substantially identical thereto (e.g., 95% to 99.9% identical thereto, or having at least one amino acid alteration, but not more than five, ten or fifteen alterations (e.g., substitutions, deletions, or insertions, e.g., conservative substitutions) to the amino acid sequence of SEQ ID NO: 3291.

[0691] In other embodiments, the NK cell engager is a ligand of NKp44 or NKp46, which is a viral HA. Viral hemagglutinins (HA) are glyco proteins which are on the surface of viruses. HA proteins allow viruses to bind to the membrane of cells via sialic acid sugar moieties which contributes to the fusion of viral membranes with the cell membranes (see e.g., Eur J Immunol. 2001 September; 31(9):2680-9 “Recognition of viral hemagglutinins by NKp44 but not by NKp30”; and Nature. 2001 Feb. 22; 409(6823):1055-60 “Recognition of haemaglutinins on virus-infected cells by NKp46 activates lysis by human NK cells” the contents of each of which are incorporated by reference herein).

[0692] In other embodiments, the NK cell engager is a ligand of NKG2D chosen from MICA, MICB, or ULBP1, e.g., wherein: (i) MICA comprises the amino acid sequence: EPHSLRYNLTVLSWDGSVQSGFLTEVHLDGQPFLRCDRQKCRAKPQGQWAEDVLGNKTWDRE TRDLTGNGKDLRMTLAHIKDQKEGLHSLQEIRVCEIHEDNSTRSSQHFYYDGELFLSQNLETKEW TMPQSSRAQTLAMNVRNFLKEDAMKTKTHYHAMHADCLQELRRYLKSGVVLRRTVPPMVNVT RSEASEGNITVTCRASGFYPWNITLSWRQDGVSLSHDTQQWGDVLPDGNGTYQTWVATRICQG EEQRFTCYMEHSGNHSTHPVPSGKVLVLQSHW (SEQ ID NO: 3292), a fragment thereof, or an amino acid sequence substantially identical thereto (e.g., 95% to 99.9% identical thereto, or having at least one amino acid alteration, but not more than five, ten or fifteen alterations (e.g., substitutions, deletions, or insertions, e.g., conservative substitutions) to the amino acid sequence of SEQ ID NO: 3292; (ii) MICB comprises the amino acid sequence: AEPHSLRYNLMVLSQDESVQSGFLAEGHLDGQPFLRYDRQKRRAKPQGQWAEDVLGAKTWDT ETEDLTENGQDLRRTLTHIKDQKGGLHSLQEIRVCEIHEDSSTRGSRHFYYDGELFLSQNLETQES TVPQSSRAQTLAMNVTNFWKEDAMKTKTHYRAMQADCLQKLQRYLKSGVAIRRTVPPMVNVT CSEVSEGNITVTCRASSFYPRNITLTWRQDGVSLSHNTQQWGDVLPDGNGTYQTWVATRIRQGE EQRFTCYMEHSGNHGTHPVPSGKVLVLQSQRTD (SEQ ID NO: 3293), a fragment thereof, or an amino acid sequence substantially identical thereto (e.g., 95% to 99.9% identical thereto, or having at least one amino acid alteration, but not more than five, ten or fifteen alterations (e.g., substitutions, deletions, or insertions, e.g., conservative substitutions) to the amino acid sequence of SEQ ID NO: 3293; or (iii) ULBP1 comprises the amino acid sequence: GWVDTHCLCYDFIITPKSRPEPQWCEVQGLVDERPFLHYDCVNHKAKAFASLGKKVNVTKTWE EQTETLRDVVDFLKGQLLDIQVENLIPIEPLTLQARMSCEHEAHGHGRGSWQFLFNGQKFLLFDS NNRKWTALHPGAKKMTEKWEKNRDVTMFFQKISLGDCKMWLEEFLMYWEQMLDPTKPPSLA PG (SEQ ID NO: 3294), a fragment thereof, or an amino acid sequence substantially identical thereto (e.g., 95% to 99.9% identical thereto, or having at least one amino acid alteration, but not more than five, ten or fifteen alterations (e.g., substitutions, deletions, or insertions, e.g., conservative substitutions) to the amino acid sequence of SEQ ID NO: 3294.

[0693] In other embodiments, the NK cell engager is a ligand of DNAM1 chosen from NECTIN2 or NECL5, e.g., wherein: (i) NECTIN2 comprises the amino acid sequence: QDVRVQVLPEVRGQLGGTVELPCHLLPPVPGLYISLVTWQRPDAPANHQNVAAFHPKMGPSFPS PKPGSERLSFVSAKQSTGQDTEAELQDATLALHGLTVEDEGNYTCEFATFPKGSVRGMTWLRVI AKPKNQAEAQKVTFSQDPTTVALCISKEGRPPARISWLSSLDWEAKETQVSGTLAGTVTVTSRFT LVPSGRADGVTVTCKVEHESFEEPALIPVTLSVRYPPEVSISGYDDNWYLGRTDATLSCDVRSNP EPTGYDWSTTSGTFPTSAVAQGSQLVIHAVDSLFNTTFVCTVTNAVGMGRAEQVIFVRETPNTA GAGATGG (SEQ ID NO: 3295), a fragment thereof, or an amino acid sequence substantially identical thereto (e.g., 95% to 99.9% identical thereto, or having at least one amino acid alteration, but not more than five, ten or fifteen alterations (e.g., substitutions, deletions, or insertions, e.g., conservative substitutions) to the amino acid sequence of SEQ ID NO: 3295; or (ii) NECL5 comprises the amino acid sequence: WPPPGTGDVVVQAPTQVPGFLGDSVTLPCYLQVPNMEVTHVSQLTWARHGESGSMAVFHQTQ GPSYSESKRLEFVAARLGAELRNASLRMFGLRVEDEGNYTCLFVTFPQGSRSVDIWLRVLAKPQ NTAEVQKVQLTGEPVPMARCVSTGGRPPAQITWHSDLGGMPNTSQVPGFLSGTVTVTSLWILVP SSQVDGKNVTCKVEHESFEKPQLLTVNLTVYYPPEVSISGYDNNWYLGQNEATLTCDARSNPEP TGYNWSTTMGPLPPFAVAQGAQLLIRPVDKPINTTLICNVTNALGARQAELTVQVKEGPPSEHSG ISRN (SEQ ID NO: 3296), a fragment thereof, or an amino acid sequence substantially identical thereto (e.g., 95% to 99.9% identical thereto, or having at least one amino acid alteration, but not more than five, ten or fifteen alterations (e.g., substitutions, deletions, or insertions, e.g., conservative substitutions) to the amino acid sequence of SEQ ID NO: 3296.

[0694] In yet other embodiments, the NK cell engager is a ligand of DAP10, which is an adapter for NKG2D (see e.g., Proc Natl Acad Sci USA. 2005 May 24; 102(21): 7641-7646; and Blood, 15 Sep. 2011 Volume 118, Number 11, the full contents of each of which is incorporated by reference herein).

[0695] In other embodiments, the NK cell engager is a ligand of CD16, which is a CD16a/b ligand, e.g., a CD16a/b ligand further comprising an antibody Fc region (see e.g., Front Immunol. 2013; 4: 76 discusses how antibodies use the Fe to trigger NK cells through CD16, the full contents of which are incorporated herein).

[0696] In other embodiments, the NK cell engager is a ligand of CRTAM, which is NECL2, e.g., wherein NECL2 comprises the amino acid sequence: QNLFTKDVTVIEGEVATISCQVNKSDDSVIQLLNPNRQTIYFRDFRPLKDSRFQLLNFSSSELKVSL TNVSISDEGRYFCQLYTDPPQESYTTITVLVPPRNLMIDIQKDTAVEGEEIEVNCTAMASKPATTIR WFKGNTELKGKSEVEEWSDMYTVTSQLMLKVHKEDDGVPVICQVEHPAVTGNLQTQRYLEVQ YKPQVHIQMTYPLQGLTREGDALELTCEAIGKPQPVMVTWVRVDDEMPQHAVLSGPNLFINNL NKTDNGTYRCEASNIVGKAHSDYMLYVYDPPTTIPPPTTTTTTTTTTTTTILTIITDSRAGEEGSIR AVDH (SEQ ID NO: 3297), a fragment thereof, or an amino acid sequence substantially identical thereto (e.g., 95% to 99.9% identical thereto, or having at least one amino acid alteration, but not more than five, ten or fifteen alterations (e.g., substitutions, deletions, or insertions, e.g., conservative substitutions) to the amino acid sequence of SEQ ID NO: 3297.

[0697] In other embodiments, the NK cell engager is a ligand of CD27, which is CD70, e.g., wherein CD70 comprises the amino acid sequence: QRFAQAQQQLPLESLGWDVAELQLNHTGPQQDPRLYWQGGPALGRSFLHGPELDKGQLRIHRD GIYMVHIQVTLAICSSTTASRHHPTTLAVGICSPASRSISLLRLSFHQGCTIASQRLTPLARGDTLCT NLTGTLLPSRNTDETFFGVQWVRP (SEQ ID NO: 3298), a fragment thereof, or an amino acid sequence substantially identical thereto (e.g., 95% to 99.9% identical thereto, or having at least one amino acid alteration, but not more than five, ten or fifteen alterations (e.g., substitutions, deletions, or insertions, e.g., conservative substitutions) to the amino acid sequence of SEQ ID NO: 3298.

[0698] In other embodiments, the NK cell engager is a ligand of PSGL1, which is L-selectin (CD62L), e.g., wherein L-selectin comprises the amino acid sequence: WTYHYSEKPMNWQRARRFCRDNYTDLVAIQNKAEIEYLEKTLPFSRSYYWIGIRKIGGIWTWVG TNKSLTEEAENWGDGEPNNKKNKEDCVEIYIKRNKDAGKWNDDACHKLKAALCYTASCQPWS CSGHGECVEIINNYTCNCDVGYYGPQCQFVIQCEPLEAPELGTMDCTHPLGNFSFSSQCAFSCSEG TNLTGIEETTCGPFGNWSSPEPTCQVIQCEPLSAPDLGIMNCSHPLASFSFTSACTFICSEGTELIGK KKTICESSGIWSNPSPICQKLDKSFSMIKEGDYN (SEQ ID NO: 3299), a fragment thereof, or an amino acid sequence substantially identical thereto (e.g., 95% to 99.9% identical thereto, or having at least one amino acid alteration, but not more than five, ten or fifteen alterations (e.g., substitutions, deletions, or insertions, e.g., conservative substitutions) to the amino acid sequence of SEQ ID NO: 3299.

[0699] In other embodiments, the NK cell engager is a ligand of CD96, which is NECL5, e.g., wherein NECL5 comprises the amino acid sequence: WPPPGTGDVVVQAPTQVPGFLGDSVTLPCYLQVPNMEVTHVSQLTWARHGESGSMAVFHQTQ GPSYSESKRLEFVAARLGAELRNASLRMFGLRVEDEGNYTCLFVTFPQGSRSVDIWLRVLAKPQ NTAEVQKVQLTGEPVPMARCVSTGGRPPAQITWHSDLGGMPNTSQVPGFLSGTVTVTSLWILVP SSQVDGKNVTCKVEHESFEKPQLLTVNLTVYYPPEVSISGYDNNWYLGQNEATLTCDARSNPEP TGYNWSTTMGPLPPFAVAQGAQLLIRPVDKPINTTLICNVTNALGARQAELTVQVKEGPPSEHSG ISRN (SEQ ID NO: 3296), a fragment thereof, or an amino acid sequence substantially identical thereto (e.g., 95% to 99.9% identical thereto, or having at least one amino acid alteration, but not more than five, ten or fifteen alterations (e.g., substitutions, deletions, or insertions, e.g., conservative substitutions) to the amino acid sequence of SEQ ID NO: 3296.

[0700] In other embodiments, the NK cell engager is a ligand of CD100 (SEMA4D), which is CD72, e.g., wherein CD72 comprises the amino acid sequence: RYLQVSQQLQQTNRVLEVTNSSLRQQLRLKITQLGQSAEDLQGSRRELAQSQEALQVEQRAHQA AEGQLQACQADRQKTKETLQSEEQQRRALEQKLSNMENRLKPFFTCGSADTCCPSGWIMHQKS CFYISLTSKNWQESQKQCETLSSKLATFSEIYPQSHSYYFLNSLLPNGGSGNSYWTGLSSNKDWK LTDDTQRTRTYAQSSKCNKVHKTWSWWTLESESCRSSLPYICEMTAFRFPD (SEQ ID NO: 3300), a fragment thereof, or an amino acid sequence substantially identical thereto (e.g., 95% to 99.9% identical thereto, or having at least one amino acid alteration, but not more than five, ten or fifteen alterations (e.g., substitutions, deletions, or insertions, e.g., conservative substitutions) to the amino acid sequence of SEQ ID NO: 3300.

[0701] In other embodiments, the NK cell engager is a ligand of NKp80, which is CLEC2B (AICL), e.g., wherein CLEC2B (AICL) comprises the amino acid sequence: KLTRDSQSLCPYDWIGFQNKCYYFSKEEGDWNSSKYNCSTQHADLTIIDNIEEMNFLRRYKCSSD HWIGLKMAKNRTGQWVDGATFTKSFGMRGSEGCAYLSDDGAATARCYTERKWICRKRIH (SEQ ID NO: 3301), a fragment thereof, or an amino acid sequence substantially identical thereto (e.g., 95% to 99.9% identical thereto, or having at least one amino acid alteration, but not more than five, ten or fifteen alterations (e.g., substitutions, deletions, or insertions, e.g., conservative substitutions) to the amino acid sequence of SEQ ID NO: 3301.

[0702] In other embodiments, the NK cell engager is a ligand of CD244, which is CD48, e.g., wherein CD48 comprises the amino acid sequence: QGHLVHMTVVSGSNVTLNISESLPENYKQLTWFYTFDQKIVEWDSRKSKYFESKFKGRVRLDPQ SGALYISKVQKEDNSTYIMRVLKKTGNEQEWKIKLQVLDPVPKPVIKIEKIEDMDDNCYLKLSCV IPGESVNYTWYGDKRPFPKELQNSVLETTLMPHNYSRCYTCQVSNSVSSKNGTVCLSPPCTLARS (SEQ ID NO: 3302), a fragment thereof, or an amino acid sequence substantially identical thereto (e.g., 95% to 99.9% identical thereto, or having at least one amino acid alteration, but not more than five, ten or fifteen alterations (e.g., substitutions, deletions, or insertions, e.g., conservative substitutions) to the amino acid sequence of SEQ ID NO: 3302.

### T Cell Engagers

[0703] Provided herein are, inter alia, multispecific (e.g., bi-, tri-, quad-specific) or multifunctional molecules that are engineered to further contain one or more T cell engager that mediate binding to and/or activation of a T cell. In some embodiments, the T cell engager is an antigen binding domain that binds to, e.g., activates TCRβ, e.g., a TCRβV region, as described herein. In some embodiments, the T cell engager is selected from an antigen binding domain or ligand that binds to (e.g., and in some embodiments activates) one or more of CD3, TCRα, TCRγ, TCRζ, ICOS, CD28, CD27, HVEM, LIGHT, CD40, 4-1BB, OX40, DR3, GITR, CD30, TIM1, SLAM, CD2, or CD226. In other embodiments, the T cell engager is selected from an antigen binding domain or ligand that binds to and does not activate one or more of CD3, TCRα, TCRγ, TCRζ, ICOS, CD28, CD27, HVEM, LIGHT, CD40, 4-1BB, OX40, DR3, GITR, CD30, TIM1, SLAM, CD2, or CD226.

### B Cell, Macrophage & Dendritic Cell Engagers

[0704] Broadly, B cells, also known as B lymphocytes, are a type of white blood cell of the lymphocyte subtype. They function in the humoral immunity component of the adaptive immune system by secreting antibodies. Additionally, B cells present antigen (they are also classified as professional antigen-presenting cells (APCs)) and secrete cytokines. Macrophages are a type of white blood cell that engulfs and digests cellular debris, foreign substances, microbes, cancer cells via phagocytosis. Besides phagocytosis, they play important roles in nonspecific defense (innate immunity) and also help initiate specific defense mechanisms (adaptive immunity) by recruiting other immune cells such as lymphocytes. For example, they are important as antigen presenters to T cells. Beyond increasing inflammation and stimulating the immune system, macrophages also play an important anti-inflammatory role and can decrease immune reactions through the release of cytokines. Dendritic cells (DCs) are antigen-presenting cells that function in processing antigen material and present it on the cell surface to the T cells of the immune system.

[0705] Provided herein are, inter alia, multispecific (e.g., bi-, tri-, quad-specific) or multifunctional molecules that further include, e.g., are engineered to contain, one or more B cell, macrophage, and/or dendritic cell engager that mediate binding to and/or activation of a B cell, macrophage, and/or dendritic cell.

[0706] Accordingly, in some embodiments, the immune cell engager comprises a B cell, macrophage, and/or dendritic cell engager chosen from one or more of CD40 ligand (CD40L) or a CD70 ligand; an antibody molecule that binds to CD40 or CD70; an antibody molecule to OX40; an OX40 ligand (OX40L); an agonist of a Toll-like receptor (e.g., as described herein, e.g., a TLR4, e.g., a constitutively active TLR4 (caTLR4), or a TLR9 agonists); a 41BB; a CD2; a CD47; or a STING agonist, or a combination thereof.

[0707] In some embodiments, the B cell engager is a CD40L, an OX40L, or a CD70 ligand, or an antibody molecule that binds to OX40, CD40 or CD70.

[0708] In some embodiments, the macrophage engager is a CD2 agonist. In some embodiments, the macrophage engager is an antigen binding domain that binds to: CD40L or antigen binding domain or ligand that binds CD40, a Toll like receptor (TLR) agonist (e.g., as described herein), e.g., a TLR9 or TLR4 (e.g., caTLR4 (constitutively active TLR4), CD47, or a STING agonist. In some embodiments, the STING agonist is a cyclic dinucleotide, e.g., cyclic di-GMP (cdGMP) or cyclic di-AMP (cdAMP). In some embodiments, the STING agonist is biotinylated.

[0709] In some embodiments, the dendritic cell engager is a CD2 agonist. In some embodiments, the dendritic cell engager is a ligand, a receptor agonist, or an antibody molecule that binds to one or more of: OX40L, 41BB, a TLR agonist (e.g., as described herein) (e.g., TLR9 agonist, TLR4 (e.g., caTLR4 (constitutively active TLR4)), CD47, or and a STING agonist. In some embodiments, the STING agonist is a cyclic dinucleotide, e.g., cyclic di-GMP (cdGMP) or cyclic di-AMP (cdAMP). In some embodiments, the STING agonist is biotinylated.

[0710] In other embodiments, the immune cell engager mediates binding to, or activation of, one or more of a B cell, a macrophage, and/or a dendritic cell. Exemplary B cell, macrophage, and/or dendritic cell engagers can be chosen from one or more of CD40 ligand (CD40L) or a CD70 ligand; an antibody molecule that binds to CD40 or CD70; an antibody molecule to OX40; an OX40 ligand (OX40L); a Toll-like receptor agonist (e.g., a TLR4, e.g., a constitutively active TLR4 (caTLR4) or a TLR9 agonist); a 41BB agonist; a CD2; a CD47; or a STING agonist, or a combination thereof.

[0711] In some embodiments, the B cell engager is chosen from one or more of a CD40L, an OX40L, or a CD70 ligand, or an antibody molecule that binds to OX40, CD40 or CD70.

[0712] In other embodiments, the macrophage cell engager is chosen from one or more of a CD2 agonist; a CD40L; an OX40L; an antibody molecule that binds to OX40, CD40 or CD70; a Toll-like receptor agonist or a fragment thereof (e.g., a TLR4, e.g., a constitutively active TLR4 (caTLR4)); a CD47 agonist; or a STING agonist.

[0713] In other embodiments, the dendritic cell engager is chosen from one or more of a CD2 agonist, an OX40 antibody, an OX40L, 41BB agonist, a Toll-like receptor agonist or a fragment thereof (e.g., a TLR4, e.g., a constitutively active TLR4 (caTLR4)), CD47 agonist, or a STING agonist.

[0714] In some embodiments, the OX40L comprises the amino acid sequence: QVSHRYPRIQSIKVQFTEYKKEKGFILTSQKEDEIMKVQNNSVIINCDGFYLISLKGYFSQEVNISL HYQKDEEPLFQLKKVRSVNSLMVASLTYKDKVYLNVTTDNTSLDDFHVNGGELILIHQNPGEFC VL (SEQ ID NO: 3303), a fragment thereof, or an amino acid sequence substantially identical thereto (e.g., 95% to 99.9% identical thereto, or having at least one amino acid alteration, but not more than five, ten or fifteen alterations (e.g., substitutions, deletions, or insertions, e.g., conservative substitutions) to the amino acid sequence of SEQ ID NO: 3303.

[0715] In another embodiment, the CD40L comprises the amino acid sequence: MQKGDQNPQIAAHVISEASSKTTSVLQWAEKGYYTMSNNLVTLENGKQLTVKRQGLYYIYAQV TFCSNREASSQAPFIASLCLKSPGRFERILLRAANTHSSAKPCGQQSIHLGGVFELQPGASVFVNVT DPSQVSHGTGFTSFGLLKL (SEQ ID NO: 3304), a fragment thereof, or an amino acid sequence substantially identical thereto (e.g., 95% to 99.9% identical thereto, or having at least one amino acid alteration, but not more than five, ten or fifteen alterations (e.g., substitutions, deletions, or insertions, e.g., conservative substitutions) to the amino acid sequence of SEQ ID NO: 3304.

[0716] In yet other embodiments, the STING agonist comprises a cyclic dinucleotide, e.g., a cyclic di-GMP (cdGMP), a cyclic di-AMP (cdAMP), or a combination thereof, optionally with 2′,5′ or 3′,5′ phosphate linkages.

[0717] In some embodiments, the immune cell engager includes 41BB ligand, e.g., comprising the amino acid sequence: ACPWAVSGARASPGSAASPRLREGPELSPDDPAGLLDLRQGMFAQLVAQNVLLIDGPLSWYSDP GLAGVSLTGGLSYKEDTKELVVAKAGVYYVFFQLELRRVVAGEGSGSVSLALHLQPLRSAAGA AALALTVDLPPASSEARNSAFGFQGRLLHLSAGQRLGVHLHTEARARHAWQLTQGATVLGLFR VTPEIPAGLPSPRSE (SEQ ID NO: 3305), a fragment thereof, or an amino acid sequence substantially identical thereto (e.g., 95% to 99.9% identical thereto, or having at least one amino acid alteration, but not more than five, ten or fifteen alterations (e.g., substitutions, deletions, or insertions, e.g., conservative substitutions) to the amino acid sequence of SEQ ID NO: 3305.

[0718] Toll-Like Receptors: Toll-Like Receptors (TLRs) are evolutionarily conserved receptors are homologues of the Drosophila Toll protein, and recognize highly conserved structural motifs known as pathogen-associated microbial patterns (PAMPs), which are exclusively expressed by microbial pathogens, or danger-associated molecular patterns (DAMPs) that are endogenous molecules released from necrotic or dying cells. PAMPs include various bacterial cell wall components such as lipopolysaccharide (LPS), peptidoglycan (PGN) and lipopeptides, as well as flagellin, bacterial DNA and viral double-stranded RNA. DAMPs include intracellular proteins such as heat shock proteins as well as protein fragments from the extracellular matrix. Stimulation of TLRs by the corresponding PAMPs or DAMPs initiates signaling cascades leading to the activation of transcription factors, such as AP-1, NF-xB and interferon regulatory factors (IRFs). Signaling by TLRs results in a variety of cellular responses, including the production of interferons (IFNs), pro-inflammatory cytokines and effector cytokines that direct the adaptive immune response. TLRs are implicated in a number of inflammatory and immune disorders and play a role in cancer (Rakoff-Nahoum S. & Medzhitov R., 2009. Toll-like receptors and cancer. Nat Revs Cancer 9:57-63).

[0719] TLRs are type I transmembrane proteins characterized by an extracellular domain containing leucine-rich repeats (LRRs) and a cytoplasmic tail that contains a conserved region called the Toll/IL-1 receptor (TIR) domain. Ten human and twelve murine TLRs have been characterized, TLR1 to TLR10 in humans, and TLR1 to TLR9, TLR11, TLR12 and TLR13 in mice, the homolog of TLR10 being a pseudogene. TLR2 is essential for the recognition of a variety of PAMPs from Gram-positive bacteria, including bacterial lipoproteins, lipomannans and lipoteichoic acids. TLR3 is implicated in virus-derived double-stranded RNA. TLR4 is predominantly activated by lipopolysaccharide. TLR5 detects bacterial flagellin and TLR9 is required for response to unmethylated CpG DNA. Finally, TLR7 and TLR8 recognize small synthetic antiviral molecules, and single-stranded RNA was reported to be their natural ligand. TLR11 has been reported to recognize uropathogenic E. coli and a profilin-like protein from Toxoplasma gondii. The repertoire of specificities of the TLRs is apparently extended by the ability of TLRs to heterodimerize with one another. For example, dimers of TLR2 and TLR6 are required for responses to diacylated lipoproteins while TLR2 and TLR1 interact to recognize triacylated lipoproteins. Specificities of the TLRs are also influenced by various adapter and accessory molecules, such as MD-2 and CD14 that form a complex with TLR4 in response to LPS.

[0720] TLR signaling consists of at least two distinct pathways: a MyD88-dependent pathway that leads to the production of inflammatory cytokines, and a MyD88-independent pathway associated with the stimulation of IFN-3 and the maturation of dendritic cells. The MyD88-dependent pathway is common to all TLRs, except TLR3 (Adachi O. et al., 1998. Targeted disruption of the MyD88 gene results in loss of IL-1- and IL-18-mediated function. Immunity. 9(1):143-50). Upon activation by PAMPs or DAMPs, TLRs hetero- or homodimerize inducing the recruitment of adaptor proteins via the cytoplasmic TIR domain. Individual TLRs induce different signaling responses by usage of the different adaptor molecules. TLR4 and TLR2 signaling requires the adaptor TIRAP/Mal, which is involved in the MyD88-dependent pathway. TLR3 triggers the production of IFN-3 in response to double-stranded RNA, in a MyD88-independent manner, through the adaptor TRIF/TICAM-1. TRAM/TICAM-2 is another adaptor molecule involved in the MyD88-independent pathway which function is restricted to the TLR4 pathway.

[0721] TLR3, TLR7, TLR8 and TLR9 recognize viral nucleic acids and induce type I IFNs. The signaling mechanisms leading to the induction of type I IFNs differ depending on the TLR activated. They involve the interferon regulatory factors, IRFs, a family of transcription factors known to play a critical role in antiviral defense, cell growth and immune regulation. Three IRFs (IRF3, IRF5 and IRF7) function as direct transducers of virus-mediated TLR signaling. TLR3 and TLR4 activate IRF3 and IRF7, while TLR7 and TLR8 activate IRF5 and IRF7 (Doyle S. et al., 2002. IRF3 mediates a TLR3/TLR4-specific antiviral gene program. Immunity. 17(3):251-63). Furthermore, type I IFN production stimulated by TLR9 ligand CpG-A has been shown to be mediated by PI(3)K and mTOR (Costa-Mattioli M. & Sonenberg N. 2008. RAPping production of type I interferon in pDCs through mTOR. Nature Immunol. 9: 1097-1099).

[0722] TLR-9: TLR9 recognizes unmethylated CpG sequences in DNA molecules. CpG sites are relatively rare (˜1%) on vertebrate genomes in comparison to bacterial genomes or viral DNA. TLR9 is expressed by numerous cells of the immune system such as B lymphocytes, monocytes, natural killer (NK) cells, and plasmacytoid dendritic cells. TLR9 is expressed intracellularly, within the endosomal compartments and functions to alert the immune system of viral and bacterial infections by binding to DNA rich in CpG motifs. TLR9 signals leads to activation of the cells initiating pro-inflammatory reactions that result in the production of cytokines such as type-I interferon and IL-12.

[0723] TLR Agonists: a TLR agonist can agonize one or more TLR, e.g., one or more of human TLR-1, 2, 3, 4, 5, 6, 7, 8, 9, or 10. In some embodiments, an adjunctive agent described herein is a TLR agonist. In some embodiments, the TLR agonist specifically agonizes human TLR-9. In some embodiments, the TLR-9 agonist is a CpG moiety. As used herein, a CpG moiety, is a linear dinucleotide having the sequence: 5′-C-phosphate-G-3′, that is, cytosine and guanine separated by only one phosphate. In some embodiments, the CpG moiety comprises at least 1, 2, 3, 4, 5, 6, 7, 8, 9, 10, 11, 12, 13, 14, 15, 16, 17, 18, 19, 20, 21, 22, 23, 24, 25, 26, 27, 28, 29, 30, or more CpG dinucleotides. In some embodiments, the CpG moiety consists of 1, 2, 3, 4, 5, 6, 7, 8, 9, 10, 11, 12, 13, 14, 15, 16, 17, 18, 19, 20, 21, 22, 23, 24, 25, 26, 27, 28, 29, or 30 CpG dinucleotides. In some embodiments, the CpG moiety has 1-5, 1-10, 1-20, 1-30, 1-40, 1-50, 5-10, 5-20, 5-30, 10-20, 10-30, 10-40, or 10-50 CpG dinucleotides. In some embodiments, the TLR-9 agonist is a synthetic ODN (oligodeoxynucleotides). CpG ODNs are short synthetic single-stranded DNA molecules containing unmethylated CpG dinucleotides in particular sequence contexts (CpG motifs). CpG ODNs possess a partially or completely phosphorothioated (PS) backbone, as opposed to the natural phosphodiester (PO) backbone found in genomic bacterial DNA. There are three major classes of CpG ODNs: classes A, B and C, which differ in their immunostimulatory activities. CpG-A ODNs are characterized by a PO central CpG-containing palindromic motif and a PS-modified 3′ poly-G string. They induce high IFN-α production from pDCs but are weak stimulators of TLR9-dependent NF-κB signaling and pro-inflammatory cytokine (e.g. IL-6) production. CpG-B ODNs contain a full PS backbone with one or more CpG dinucleotides. They strongly activate B cells and TLR9-dependent NF-κB signaling but weakly stimulate IFN-α secretion. CpG-C ODNs combine features of both classes A and B. They contain a complete PS backbone and a CpG-containing palindromic motif. C-Class CpG ODNs induce strong IFN-α production from pDC as well as B cell stimulation.

### Stromal Modifying Moieties

[0724] In some embodiments, the multifunctional molecule further includes a stromal modifying moiety. A “stromal modifying moiety,” as used herein refers to an agent, e.g., a protein (e.g., an enzyme), that is capable of altering, e.g., degrading a component of, the stroma. In embodiments, the component of the stroma is chosen from, e.g., an ECM component, e.g., a glycosaminoglycan, e.g., hyaluronan (also known as hyaluronic acid or HA), chondroitin sulfate, chondroitin, dermatan sulfate, heparin sulfate, heparin, entactin, tenascin, aggrecan and keratin sulfate; or an extracellular protein, e.g., collagen, laminin, elastin, fibrinogen, fibronectin, and vitronectin.

[0725] Solid tumors have a distinct structure that mimics that of normal tissues and comprises two distinct but interdependent compartments: the parenchyma (neoplastic cells) and the stroma that the neoplastic cells induce and in which they are dispersed. All tumors have stroma and require stroma for nutritional support and for the removal of waste products. In the case of tumors which grow as cell suspensions (e.g., leukemias, ascites tumors), the blood plasma serves as stroma (Connolly J L et al. Tumor Structure and Tumor Stroma Generation. In: Kufe D W et al., editors. Holland-Frei Cancer Medicine. 6th edition. Hamilton: BC Decker; 2003). The stroma includes a variety of cell types, including fibroblasts/myofibroblasts, glial, epithelial, fat, vascular, smooth muscle, and immune cells along with extracellular matrix (ECM) and extracellular molecules (Li Hanchen et al. Tumor Microenvironment: The Role of the Tumor Stroma in Cancer. J of Cellular Biochemistry 101: 805-815 (2007)).

[0726] Stromal modifying moieties described herein include moieties (e.g., proteins, e.g., enzymes) capable of degrading a component of the stroma, e.g., an ECM component, e.g., a glycosaminoglycan, e.g., hyaluronan (also known as hyaluronic acid or HA), chondroitin sulfate, chondroitin, dermatan sulfate, heparin sulfate, heparin, entactin, tenascin, aggrecan and keratin sulfate; or an extracellular protein, e.g., collagen, laminin, elastin, fibrinogen, fibronectin, and vitronectin.

### Stromal Modifying Enzymes

[0727] In some embodiments, the stromal modifying moiety is an enzyme. For example, the stromal modifying moiety can include, but is not limited to a hyaluronidase, a collagenase, a chondroitinase, a matrix metalloproteinase (e.g., macrophage metalloelastase).

### Hyaluronidases

[0728] Hyaluronidases are a group of neutral- and acid-active enzymes found throughout the animal kingdom. Hyaluronidases vary with respect to substrate specificity, and mechanism of action. There are three general classes of hyaluronidases: (1) Mammalian-type hyaluronidases, (EC 3.2.1.35) which are endo-beta-N-acetylhexosaminidases with tetrasaccharides and hexasaccharides as the major end products. They have both hydrolytic and transglycosidase activities, and can degrade hyaluronan and chondroitin sulfates; (2) Bacterial hyaluronidases (EC 4.2.99.1) degrade hyaluronan and, and to various extents, chondroitin sulfate and dermatan sulfate. They are endo-beta-N-acetylhexosaminidases that operate by a beta elimination reaction that yields primarily disaccharide end products; (3) Hyaluronidases (EC 3.2.1.36) from leeches, other parasites, and crustaceans are endo-beta-glucuronidases that generate tetrasaccharide and hexasaccharide end products through hydrolysis of the beta 1-3 linkage.

[0729] Mammalian hyaluronidases can be further divided into two groups: (1) neutral active and (2) acid active enzymes. There are six hyaluronidase-like genes in the human genome, HYAL1, HYAL2, HYAL3 HYAL4 HYALP1 and PH20/SPAM1. HYALP1 is a pseudogene, and HYAL3 has not been shown to possess enzyme activity toward any known substrates. HYAL4 is a chondroitinase and lacks activity towards hyaluronan. HYAL1 is the prototypical acid-active enzyme and PH20 is the prototypical neutral-active enzyme. Acid active hyaluronidases, such as HYAL1 and HYAL2 lack catalytic activity at neutral pH. For example, HYAL1 has no catalytic activity in vitro over pH 4.5 (Frost and Stem, “A Microtiter-Based Assay for Hyaluronidase Activity Not Requiring Specialized Reagents”, Analytical Biochemistry, vol. 251, pp. 263-269 (1997). HYAL2 is an acid active enzyme with a very low specific activity in vitro.

[0730] In some embodiments the hyaluronidase is a mammalian hyaluronidase. In some embodiments the hyaluronidase is a recombinant human hyaluronidase. In some embodiments, the hyaluronidase is a neutral active hyaluronidase. In some embodiments, the hyaluronidase is a neutral active soluble hyaluronidase. In some embodiments, the hyaluronidase is a recombinant PH20 neutral-active enzyme. In some embodiments, the hyaluronidase is a recombinant PH20 neutral-active soluble enzyme. In some embodiments the hyaluronidase is glycosylated. In some embodiments, the hyaluronidase possesses at least one N-linked glycan. A recombinant hyaluronidase can be produced using conventional methods known to those of skill in the art, e.g., U.S. Pat. No. 7,767,429, the entire contents of which are incorporated by reference herein.

[0731] In some embodiments the hyaluronidase is rHuPH20 (also referred to as Hylenex®; presently manufactured by Halozyme; approved by the FDA in 2005 (see e.g., Scodeller P (2014) Hyaluronidase and other Extracellular Matrix Degrading Enzymes for Cancer Therapy: New Uses and Nano-Formulations. J Carcinog Mutage 5:178; U.S. Pat. Nos. 7,767,429; 8,202,517; 7,431,380; 8,450,470; 8,772,246; 8,580,252, the entire contents of each of which is incorporated by reference herein). rHuPH20 is produced by genetically engineered CHO cells containing a DNA plasmid encoding for a soluble fragment of human hyaluronidase PH20. In some embodiments the hyaluronidase is glycosylated. In some embodiments, the hyaluronidase possesses at least one N-linked glycan. A recombinant hyaluronidase can be produced using conventional methods known to those of skill in the art, e.g., U.S. Pat. No. 7,767,429, the entire contents of which are incorporated by reference herein. In some embodiments, rHuPH20 has a sequence at least 95% (e.g., at least 96%, 97%, 98%, 99%, 100%) identical to the amino acid sequence of

(SEQ ID NO: 3306)
LNFRAPPVIPNVPFLWAWNAPSEFCLGKFDEPLDMSLFSFIGSPRINAT
GQGVTIFYVDRLGYYPYIDSITGVTVNGGIPQKISLQDHLDKAKKDITF
YMPVDNLGMAVIDWEEWRPTWARNWKPKDVYKNRSIELVQQQNVQLSLT
EATEKAKQEFEKAGKDFLVETIKLGKLLRPNHLWGYYLFPDCYNHHYKK
PGYNGSCFNVEIKRNDDLSWLWNESTALYPSIYLNTQQSPVAATLYVRN
RVREAIRVSKIPDAKSPLPVFAYTRIVFTDQVLKFLSQDELVYTFGETV
ALGASGIVIWGTLSIMRSMKSCLLLDNYMETILNPYIINVTLAAKMCSQ
VLCQEQGVCIRKNWNSSDYLHLNPDNFAIQLEKGGKFTVRGKPTLEDLE
QFSEKFYCSCYSTLSCKEKADVKDTDAVDVCIADGVCIDAFLKPPMETE
EPQIFYNASPSTLS.

[0732] In any of the methods provided herein, the anti-hyaluronan agent can be an agent that degrades hyaluronan or can be an agent that inhibits the synthesis of hyaluronan. For example, the anti-hyaluronan agent can be a hyaluronan degrading enzyme. In another example, the anti-hyaluronan agent or is an agent that inhibits hyaluronan synthesis. For example, the anti-hyaluronan agent is an agent that inhibits hyaluronan synthesis such as a sense or antisense nucleic acid molecule against an HA synthase or is a small molecule drug. For example, an anti-hyaluronan agent is 4-methylumbelliferone (MU) or a derivative thereof, or leflunomide or a derivative thereof. Such derivatives include, for example, a derivative of 4-methylumbelliferone (MU) that is 6,7-dihydroxy-4-methyl coumarin or 5,7-dihydroxy-4-methyl coumarin.

[0733] In further examples of the methods provided herein, the hyaluronan degrading enzyme is a hyaluronidase. In some examples, the hyaluronan-degrading enzyme is a PH20 hyaluronidase or truncated form thereof to lacking a C-terminal glycosylphosphatidylinositol (GPI) attachment site or a portion of the GPI attachment site. In specific examples, the hyaluronidase is a PH20 selected from a human, monkey, bovine, ovine, rat, mouse or guinea pig PH20. For example, the hyaluronan-degrading enzyme is a human PH20 hyaluronidase that is neutral active and N-glycosylated and is selected from among (a) a hyaluronidase polypeptide that is a full-length PH20 or is a C-terminal truncated form of the PH20, wherein the truncated form includes at least amino acid residues 36-464 of SEQ ID NO: 139, such as 36-481, 36-482, 36-483, where the full-length PH20 has the sequence of amino acids set forth in SEQ ID NO: 139; or (b) a hyaluronidase polypeptide comprising a sequence of amino acids having at least 85%, 86%, 87%, 88%, 89%, 90%, 91%, 92%, 93%, 94%, 95%, 96%, 97%, 98%, 99% or more sequence identity with the polypeptide or truncated form of sequence of amino acids set forth in SEQ ID NO: 139; or (c) a hyaluronidase polypeptide of (a) or (b) comprising amino acid substitutions, whereby the hyaluronidase polypeptide has a sequence of amino acids having at least 85%, 86%, 87%, 88%, 89%, 90%, 91%, 92%, 93%, 94%, 95%, 96%, 97%, 98%, 99% or more sequence identity with the polypeptide set forth in SEQ ID NO: 139 or the with the corresponding truncated forms thereof. In exemplary examples, the hyaluronan-degrading enzyme is a PH20 that comprises a composition designated rHuPH20.

[0734] In other examples, the anti-hyaluronan agent is a hyaluronan degrading enzyme that is modified by conjugation to a polymer. The polymer can be a PEG and the anti-hyaluronan agent a PEGylated hyaluronan degrading enzyme. Hence, in some examples of the methods provided herein the hyaluronan-degrading enzyme is modified by conjugation to a polymer. For example, the hyaluronan-degrading enzyme is conjugated to a PEG, thus the hyaluronan degrading enzyme is PEGylated. In an exemplary example, the hyaluronan-degrading enzyme is a PEGylated PH20 enzyme (PEGPH20). In the methods provided herein, the corticosteroid can be a glucocorticoid that is selected from among cortisones, dexamethasones, hydrocortisones, methylprednisolones, prednisolones and prednisones.

### Chondroitinases

[0735] Chondroitinases are enzymes found throughout the animal kingdom which degrade glycosaminoglycans, specifically chondroitins and chondroitin sulfates, through an endoglycosidase reaction. In some embodiments the chondroitinase is a mammalian chondroitinase. In some embodiments the chondroitinase is a recombinant human chondroitinase. In some embodiments the chondroitinase is HYAL4. Other exemplary chondroitinases include chondroitinase ABC (derived from Proteus vulgaris; Japanese Patent Application Laid-open No 6-153947, T. Yamagata et al. J. Biol. Chem., 243, 1523 (1968), S. Suzuki et al, J. Biol. Chem., 243, 1543 (1968)), chondroitinase AC (derived from Flavobacterium heparinum; T. Yamagata et al., J. Biol. Chem., 243, 1523 (1968)), chondroitinase AC II (derived from Arthrobacter aurescens; K. Hiyama, and S. Okada, J. Biol. Chem., 250, 1824 (1975), K. Hiyama and S. Okada, J. Biochem. (Tokyo), 80, 1201 (1976)), Hyaluronidase ACIII (derived from Flavobacterium sp. Hp102; Hirofumi Miyazono et al., Seikagaku, 61, 1023 (1989)), chondroitinase B (derived from Flavobacterium heparinum; Y. M. Michelacci and C. P. Dietrich, Biochem. Biophys. Res. Commun., 56, 973 (1974), Y. M. Michelacci and C. P. Dietrich, Biochem. J., 151, 121 (1975), Kenichi Maeyama et al, Seikagaku, 57, 1189 (1985)), chondroitinase C (derived from Flavobacterium sp. Hp102; Hirofumi Miyazono et al, Seikagaku, 61, 1023 (1939)), and the like.

### Matrix Metalloproteinases

[0736] Matrix metalloproteases (MMPs) are zinc-dependent endopeptidases that are the major proteases involved in extracellular matrix (ECM) degradation. MMPs are capable of degrading a wide range of extracellular molecules and a number of bioactive molecules. Twenty-four MMP genes have been identified in humans, which can be organized into six groups based on domain organization and substrate preference: Collagenases (MMP-1, -8 and -13), Gelatinases (MMP-2 and MMP-9), Stromelysins (MMP-3, -10 and -11), Matrilysin (MMP-7 and MMP-26), Membrane-type (MT)-MMPs (MMP-14, -15, -16, -17, -24 and -25) and others (MMP-12, -19, -20, -21, -23, -27 and -28). In some embodiments, the stromal modifying moiety is a human recombinant MMP (e.g., MMP-1, -2, -3, -4, -5, -6, -7, -8, -9, 10, -11, -12, -13, -14, 15, -15, -17, -18, -19, 20, -21, -22, -23, or -24).

### Collagenases

[0737] The three mammalian collagenases (MMP-1, -8, and -13) are the principal secreted endopeptidases capable of cleaving collagenous extracellular matrix. In addition to fibrillar collagens, collagenases can cleave several other matrix and non-matrix proteins including growth factors. Collagenases are synthesized as inactive pro-forms, and once activated, their activity is inhibited by specific tissue inhibitors of metalloproteinases, TIMPs, as well as by non-specific proteinase inhibitors (Ala-aho R et al. Biochimie. Collagenases in cancer. 2005 March-April; 87(3-4):273-86). In some embodiments, the stromal modifying moiety is a collagenase. In some embodiments, the collagenase is a human recombinant collagenase. In some embodiments, the collagenase is MMP-1. In some embodiments, the collagenase is MMP-8. In some embodiments, the collagenase is MMP-13.

### Macrophage Metalloelastase

[0738] Macrophage metalloelastase (MME), also known as MMP-12, is a member of the stromelysin subgroup of MMPs and catalyzes the hydrolysis of soluble and insoluble elastin and a broad selection of matrix and nonmatrix substrates including type IV collagen, fibronectin, laminin, vitronectin, entactin, heparan, and chondroitin sulfates (Erja Kerkela et al. Journal of Investigative Dermatology (2000) 114, 1113-1119; doi:10.1046/j.1523-1747.2000.00993). In some embodiments, the stromal modifying moiety is a MME. In some embodiments, the MME is a human recombinant MME. In some embodiments, the MME is MMP-12.

### Additional Stromal Modifying Moieties

[0739] In some embodiments, the stromal modifying moiety causes one or more of: decreases the level or production of a stromal or extracellular matrix (ECM) component; decreases tumor fibrosis; increases interstitial tumor transport; improves tumor perfusion; expands the tumor microvasculature; decreases interstitial fluid pressure (IFP) in a tumor; or decreases or enhances penetration or diffusion of an agent, e.g., a cancer therapeutic or a cellular therapy, into a tumor or tumor vasculature.

[0740] In some embodiments, the stromal or ECM component decreased is chosen from a glycosaminoglycan or an extracellular protein, or a combination thereof. In some embodiments, the glycosaminoglycan is chosen from hyaluronan (also known as hyaluronic acid or HA), chondroitin sulfate, chondroitin, dermatan sulfate, heparin, heparin sulfate, entactin, tenascin, aggrecan and keratin sulfate. In some embodiments, the extracellular protein is chosen from collagen, laminin, elastin, fibrinogen, fibronectin, or vitronectin. In some embodiments, the stromal modifying moiety includes an enzyme molecule that degrades a tumor stroma or extracellular matrix (ECM). In some embodiments, the enzyme molecule is chosen from a hyaluronidase molecule, a collagenase molecule, a chondroitinase molecule, a matrix metalloproteinase molecule (e.g., macrophage metalloelastase), or a variant (e.g., a fragment) of any of the aforesaid. The term “enzyme molecule” includes a full length, a fragment or a variant of the enzyme, e.g., an enzyme variant that retains at least one functional property of the naturally-occurring enzyme.

[0741] In some embodiments, the stromal modifying moiety decreases the level or production of hyaluronic acid. In other embodiments, the stromal modifying moiety comprises a hyaluronan degrading enzyme, an agent that inhibits hyaluronan synthesis, or an antibody molecule against hyaluronic acid.

[0742] In some embodiments, the hyaluronan degrading enzyme is a hyaluronidase molecule, e.g., a full length or a variant (e.g., fragment thereof) thereof. In some embodiments, the hyaluronan degrading enzyme is active in neutral or acidic pH, e.g., pH of about 4-5. In some embodiments, the hyaluronidase molecule is a mammalian hyaluronidase molecule, e.g., a recombinant human hyaluronidase molecule, e.g., a full length or a variant (e.g., fragment thereof, e.g., a truncated form) thereof. In some embodiments, the hyaluronidase molecule is chosen from HYAL1, HYAL2, or PH-20/SPAM1, or a functional fragment or a functional variant thereof (e.g., a truncated form thereof). In some embodiments, the truncated form lacks a C-terminal glycosylphosphatidylinositol (GPI) attachment site or a portion of the GPI attachment site. In some embodiments, the hyaluronidase molecule is glycosylated, e.g., comprises at least one N-linked glycan.

[0743] In some embodiments, the hyaluronidase molecule comprises the amino acid sequence: LNFRAPPVIPNVPFLWAWNAPSEFCLGKFDEPLDMSLFSFIGSPRINATGQGVTIFYVDRLGYYPY IDSITGVTVNGGIPQKISLQDHLDKAKKDITFYMPVDNLGMAVIDWEEWRPTWARNWKPKDVY KNRSIELVQQQNVQLSLTEATEKAKQEFEKAGKDFLVETIKLGKLLRPNHLWGYYLFPDCYNHH YKKPGYNGSCFNVEIKRNDDLSWLWNESTALYPSIYLNTQQSPVAATLYVRNRVREAIRVSKIPD AKSPLPVFAYTRIVFTDQVLKFLSQDELVYTFGETVALGASGIVIWGTLSIMRSMKSCLLLDNYM ETILNPYIINVTLAAKMCSQVLCQEQGVCIRKNWNSSDYLHLNPDNFAIQLEKGGKFTVRGKPTL EDLEQFSEKFYCSCYSTLSCKEKADVKDTDAVDVCIADGVCIDAFLKPPMETEEPQIFYNASPSTL S (SEQ ID NO:3311), or a fragment thereof, or an amino acid sequence substantially identical thereto (e.g., 95% to 99.9% identical thereto, or having at least one amino acid alteration, but not more than five, ten or fifteen alterations (e.g., substitutions, deletions, or insertions, e.g., conservative substitutions) to the amino acid sequence of SEQ ID NO: 3311.

[0744] In some embodiments, the hyaluronidase molecule comprises: (i) the amino acid sequence of 36-464 of SEQ ID NO: 3311; (ii) the amino acid sequence of 36-481, 36-482, or 36-483 of PH20, wherein PH20 has the sequence of amino acids set forth in SEQ ID NO: 3311; or (iii) an amino acid sequence having at least 95% to 100% sequence identity to the polypeptide or truncated form of sequence of amino acids set forth in SEQ ID NO: 3311; or (iv) an amino acid sequence having 30, 20, 10, 5 or fewer amino acid substitutions to the amino acid sequence set forth in SEQ ID NO: 3311. In some embodiments, the hyaluronidase molecule comprises an amino acid sequence at least 95% (e.g., at least 95%, 96%, 97%, 98%, 99%, 100%) identical to the amino acid sequence of SEQ ID NO: 3311. In some embodiments, the hyaluronidase molecule is encoded by a nucleotide sequence at least 95% (e.g., at least 96%, 97%, 98%, 99%, 100%) identical to the nucleotide sequence of SEQ ID NO: 3311.

[0745] In some embodiments, the hyaluronidase molecule is PH20, e.g., rHuPH20. In some embodiments, the hyaluronidase molecule is HYAL1 and comprises the amino acid sequence: FRGPLLPNRPFTTVWNANTQWCLERHGVDVDVSVFDVVANPGQTFRGPDMTIFYSSQGTYPYY TPTGEPVFGGLPQNASLIAHLARTFQDILAAIPAPDFSGLAVIDWEAWRPRWAFNWDTKDIYRQR SRALVQAQHPDWPAPQVEAVAQDQFQGAARAWMAGTLQLGRALRPRGLWGFYGFPDCYNYD FLSPNYTGQCPSGIRAQNDQLGWLWGQSRALYPSIYMPAVLEGTGKSQMYVQHRVAEAFRVAV AAGDPNLPVLPYVQIFYDTTNHFLPLDELEHSLGESAAQGAAGVVLWVSWENTRTKESCQAIKE YMDTTLGPFILNVTSGALLCSQALCSGHGRCVRRTSHPKALLLLNPASFSIQLTPGGGPLSLRGAL SLEDQAQMAVEFKCRCYPGWQAPWCERKSMW (SEQ ID NO: 3312), or a fragment thereof, or an amino acid sequence substantially identical thereto (e.g., 95% to 99.9% identical thereto, or having at least one amino acid alteration, but not more than five, ten or fifteen alterations (e.g., substitutions, deletions, or insertions, e.g., conservative substitutions) to the amino acid sequence of SEQ ID NO: 3312.

[0746] In some embodiments, the hyaluronan degrading enzyme, e.g., the hyaluronidase molecule, further comprises a polymer, e.g., is conjugated to a polymer, e.g., PEG. In some embodiments, the hyaluronan-degrading enzyme is a PEGylated PH20 enzyme (PEGPH20). In some embodiments, the hyaluronan degrading enzyme, e.g., the hyaluronidase molecule, further comprises an immunoglobulin chain constant region (e.g., Fc region) chosen from, e.g., the heavy chain constant regions of IgG1, IgG2, IgG3, and IgG4, more particularly, the heavy chain constant region of human IgG1, IgG2, IgG3, or IgG4. In some embodiments, the immunoglobulin constant region (e.g., the Fc region) is linked, e.g., covalently linked to, the hyaluronan degrading enzyme, e.g., the hyaluronidase molecule. In some embodiments, the immunoglobulin chain constant region (e.g., Fc region) is altered, e.g., mutated, to increase or decrease one or more of: Fc receptor binding, antibody glycosylation, the number of cysteine residues, effector cell function, or complement function. In some embodiments, the hyaluronan degrading enzyme, e.g., the hyaluronidase molecule forms a dimer.

[0747] In some embodiments, the stromal modifying moiety comprises an inhibitor of the synthesis of hyaluronan, e.g., an HA synthase. In some embodiments, the inhibitor comprises a sense or an antisense nucleic acid molecule against an HA synthase or is a small molecule drug. In some embodiments, the inhibitor is 4-methylumbelliferone (MU) or a derivative thereof (e.g., 6,7-dihydroxy-4-methyl coumarin or 5,7-dihydroxy-4-methyl coumarin), or leflunomide or a derivative thereof.

[0748] In some embodiments, the stromal modifying moiety comprises antibody molecule against hyaluronic acid.

[0749] In some embodiments, the stromal modifying moiety comprises a collagenase molecule, e.g., a mammalian collagenase molecule, or a variant (e.g., fragment) thereof. In some embodiments, the collagenase molecule is collagenase molecule IV, e.g., comprising the amino acid sequence of: YNFFPRKPKWDKNQITYRIIGYTPDLDPETVDDAFARAFQVWSDVTPLRFSRIHDGEADIMINFG RWEHGDGYPFDGKDGLLAHAFAPGTGVGGDSHFDDDELWTLGEGQVVRVKYGNADGEYCKF PFLFNGKEYNSCTDTGRSDGFLWCSTTYNFEKDGKYGFCPHEALFTMGGNAEGQPCKFPFRFQG TSYDSCTTEGRTDGYRWCGTTEDYDRDKKYGFCPETAMSTVGGNSEGAPCVFPFTFLGNKYESC TSAGRSDGKMWCATTANYDDDRKWGFCPDQGYSLFLVAAHEFGHAMGLEHSQDPGALMAPIY TYTKNFRLSQDDIKGIQELYGASPDIDLGTGPTPTLGPVTPEICKQDIVFDGIAQIRGEIFFFKDRFI WRTVTPRDKPMGPLLVATFWPELPEKIDAVYEAPQEEKAVFFAGNEYWIYSASTLERGYPKPLT SLGLPPDVQRVDAAFNWSKNKKTYIFAGDKFWRYNEVKKKMDPGFPKLIADAWNAIPDNLDA VVDLQGGGHSYFFKGAYYLKLENQSLKSVKFGSIKSDWLGC (SEQ ID NO: 3313), or a fragment thereof, or an amino acid sequence substantially identical thereto (e.g., 95% to 99.9% identical thereto, or having at least one amino acid alteration, but not more than five, ten or fifteen alterations (e.g., substitutions, deletions, or insertions, e.g., conservative substitutions) to the amino acid sequence of SEQ ID NO: 3313.

### Tumor Antigen Moiety

[0750] In some embodiments, the multifunctional molecule further includes a tumor antigen moiety. In some embodiments, the tumor-targeting moiety is an antigen, e.g., a cancer antigen. In some embodiments, the cancer antigen is a tumor antigen or stromal antigen, or a hematological antigen.

[0751] “Cancer” as used herein can encompass all types of oncogenic processes and/or cancerous growths. In embodiments, cancer includes primary tumors as well as metastatic tissues or malignantly transformed cells, tissues, or organs. In embodiments, cancer encompasses all histopathologies and stages, e.g., stages of invasiveness/severity, of a cancer. In embodiments, cancer includes relapsed and/or resistant cancer. The terms “cancer” and “tumor” can be used interchangeably. For example, both terms encompass solid and liquid tumors. As used herein, the term “cancer” or “tumor” includes premalignant, as well as malignant cancers and tumors.

[0752] In some embodiments, the tumor-targeting moiety, e.g., cancer antigen, is chosen from: BCMA, FcRH5, CD19, CD20, CD22, CD30, CD33, CD38, CD47, CD99, CD123, FcRH5, CLEC12, CD179A, SLAMF7, or NY-ESO1, PDL1, CD47, gangloside 2 (GD2), prostate stem cell antigen (PSCA), prostate specific membrane antigen (PMSA), prostate-specific antigen (PSA), carcinoembryonic antigen (CEA), Ron Kinase, c-Met, Immature laminin receptor, TAG-72, BING-4, Calcium-activated chloride channel 2, Cyclin-B1, 9D7, Ep-CAM, EphA3, Her2/neu, Telomerase, SAP-1, Survivin, NY-ESO-1/LAGE-1, PRAME, SSX-2, Melan-A/MART-1, Gp100/pmel17, Tyrosinase, TRP-1/-2, MC1R, β-catenin, BRCA1/2, CDK4, CML66, Fibronectin, p53, Ras, TGF-B receptor, AFP, ETA, MAGE, MUC-1, CA-125, BAGE, GAGE, NY-ESO-1, β-catenin, CDK4, CDC27, α actinin-4, TRP1/gp75, TRP2, gp100, Melan-A/MART1, gangliosides, WT1, EphA3, Epidermal growth factor receptor (EGFR), MART-2, MART-1, MUC1, MUC2, MUM1, MUM2, MUM3, NA88-1, NPM, OA1, OGT, RCC, RUI1, RUI2, SAGE, TRG, TRP1, TSTA, Folate receptor alpha, L1-CAM, CAIX, gpA33, GD3, GM2, VEGFR, Intergrins (Integrin alphaVbeta3, Integrin alpha5Beta1), Carbohydrates (Le), IGF1R, EPHA3, TRAILR1, TRAILR2, RANKL, (FAP), TGF-beta, hyaluronic acid, collagen, e.g., collagen IV, tenascin C, or tenascin W. In some embodiments, the tumor-targeting moiety, e.g., cancer antigen, is BCMA. In some embodiments, the tumor-targeting moiety, e.g., cancer antigen, is FcRH5.

[0753] In some embodiments, the tumor-targeting moiety, e.g., cancer antigen, is chosen from: CD19, CD123, CD22, CD30, CD171, CS-1, C-type lectin-like molecule-1, CD33, epidermal growth factor receptor variant III (EGFRvIII), ganglioside G2 (GD2), ganglioside GD3, TNF receptor family member B cell maturation (BCMA), Tn antigen ((Tn Ag) or (GalNAca-Ser/Thr)), prostate-specific membrane antigen (PSMA), Receptor tyrosine kinase-like orphan receptor 1 (RORI), Fms-Like Tyrosine Kinase 3 (FLT3), Tumor-associated glycoprotein 72 (TAG72), CD38, CD44v6, Carcinoembryonic antigen (CEA), Epithelial cell adhesion molecule (EPCAM), B7H3 (CD276), KIT (CD117), Interleukin-13 receptor subunit alpha-2, mesothelin, Interleukin 11 receptor alpha (IL-11Ra), prostate stem cell antigen (PSCA), Protease Serine 21, vascular endothelial growth factor receptor 2 (VEGFR2), Lewis(Y) antigen, CD24, Platelet-derived growth factor receptor beta (PDGFR-beta), Stage-specific embryonic antigen-4 (SSEA-4), CD20, Folate receptor alpha, Receptor tyrosine-protein kinase ERBB2 (Her2/neu), Mucin 1, cell surface associated (MUC1), epidermal growth factor receptor (EGFR), neural cell adhesion molecule (NCAM), Prostase, prostatic acid phosphatase (PAP), elongation factor 2 mutated (ELF2M), Ephrin B2, fibroblast activation protein alpha (FAP), insulin-like growth factor 1 receptor (IGF-I receptor), carbonic anhydrase IX (CAIX), Proteasome (Prosome, Macropain) Subunit, Beta Type, 9 (LMP2), glycoprotein 100 (gp100), oncogene fusion protein consisting of breakpoint cluster region (BCR) and Abelson murine leukemia viral oncogene homolog 1 (Ab1) (bcr-ab1), tyrosinase, ephrin type-A receptor 2 (EphA2), Fucosyl GM1, sialyl Lewis adhesion molecule (sLe), ganglioside GM3, transglutaminase 5 (TGS5), high molecular weight-melanoma-associated antigen (HMWMAA), o-acetyl-GD2 ganglioside (OAcGD2), Folate receptor beta, tumor endothelial marker 1 (TEM1/CD248), tumor endothelial marker 7-related (TEM7R), claudin 6 (CLDN6), thyroid stimulating hormone receptor (TSHR), G protein-coupled receptor class C group 5, member D (GPRC5D), chromosome X open reading frame 61 (CXORF61), CD97, CD179a, anaplastic lymphoma kinase (ALK), Polysialic acid, placenta-specific 1 (PLAC1), hexasaccharide portion of globoH glycoceramide (GloboH), mammary gland differentiation antigen (NY-BR-1), uroplakin 2 (UPK2), Hepatitis A virus cellular receptor 1 (HAVCR1), adrenoceptor beta 3 (ADRB3), pannexin 3 (PANX3), G protein-coupled receptor 20 (GPR20), lymphocyte antigen 6 complex, locus K 9 (LY6K), Olfactory receptor 51E2 (OR51E2), TCR Gamma Alternate Reading Frame Protein (TARP), Wilms tumor protein (WT1), Cancer/testis antigen 1 (NY-ESO-1), Cancer/testis antigen 2 (LAGE-1a), Melanoma-associated antigen 1 (MAGE-A1), ETS translocation-variant gene 6, located on chromosome 12p (ETV6-AML), sperm protein 17 (SPA17), X Antigen Family, Member 1A (XAGE1), angiopoietin-binding cell surface receptor 2 (Tie 2), melanoma cancer testis antigen-1 (MAD-CT-1), melanoma cancer testis antigen-2 (MAD-CT-2), Fos-related antigen 1, tumor protein p53 (p53), p53 mutant, prostein, surviving, telomerase, prostate carcinoma tumor antigen-1, melanoma antigen recognized by T cells 1, Rat sarcoma (Ras) mutant, human Telomerase reverse transcriptase (hTERT), sarcoma translocation breakpoints, melanoma inhibitor of apoptosis (ML-IAP), ERG (transmembrane protease, serine 2 (TMPRSS2) ETS fusion gene), N-Acetyl glucosaminyl-transferase V (NA17), paired box protein Pax-3 (PAX3), Androgen receptor, Cyclin B1, v-myc avian myelocytomatosis viral oncogene neuroblastoma derived homolog (MYCN), Ras Homolog Family Member C (RhoC), Tyrosinase-related protein 2 (TRP-2), Cytochrome P450 1B1 (CYP1B1), CCCTC-Binding Factor (Zinc Finger Protein)-Like, Squamous Cell Carcinoma Antigen Recognized By T Cells 3 (SART3), Paired box protein Pax-5 (PAX5), proacrosin binding protein sp32 (OY-TES1), lymphocyte-specific protein tyrosine kinase (LCK), A kinase anchor protein 4 (AKAP-4), synovial sarcoma, X breakpoint 2 (SSX2), Receptor for Advanced Glycation Endproducts (RAGE-1), renal ubiquitous 1 (RU1), renal ubiquitous 2 (RU2), legumain, human papilloma virus E6 (HPV E6), human papilloma virus E7 (HPV E7), intestinal carboxyl esterase, heat shock protein 70-2 mutated (mut hsp70-2), CD79a, CD79b, CD72, Leukocyte-associated immunoglobulin-like receptor 1 (LAIR1), Fc fragment of IgA receptor (FCAR or CD89), Leukocyte immunoglobulin-like receptor subfamily A member 2 (LILRA2), CD300 molecule-like family member f (CD300LF), C-type lectin domain family 12 member A (CLEC12A), bone marrow stromal cell antigen 2 (BST2), EGF-like module-containing mucin-like hormone receptor-like 2 (EMR2), lymphocyte antigen 75 (LY75), Glypican-3 (GPC3), Fc receptor-like 5 (FCRL5), or immunoglobulin lambda-like polypeptide 1 (IGLL1).

### FcRH5 Targeting Moieties:

[0754] In some embodiments, the multispecific molecules as described herein include a targeting moiety that binds to FcRH5 (e.g., a FcRH5 targeting moiety). The FcRH5 targeting moiety can be chosen from an antibody molecule (e.g., an antigen binding domain as described herein), a receptor or a receptor fragment, or a ligand or a ligand fragment, or a combination thereof. In some embodiments, the FcRH5 targeting moiety associates with, e.g., binds to, a cancer or hematopoietic cell (e.g., a molecule, e.g., antigen, present on the surface of the cancer or hematopoietic cell). In certain embodiments, the FcRH5 targeting moiety targets, e.g., directs the multispecific molecules as described herein to a cancer or hematopoietic cell. In some embodiments, the cancer is a hematological cancer, e.g., multiple myeloma.

[0755] In some embodiments, the multispecific molecule, e.g., the FcRH5 targeting moiety, binds to a FcRH5 antigen on the surface of a cell, e.g., a cancer or hematopoietic cell. The FcRH5 antigen can be present on a primary tumor cell, or a metastatic lesion thereof. In some embodiments, the cancer is a hematological cancer, e.g., multiple myeloma. For example, the FcRH5 antigen can be present on a tumor, e.g., a tumor of a class typified by having one or more of: limited tumor perfusion, compressed blood vessels, or fibrotic tumor interstitium.

[0756] The multispecific molecules described herein includes a FcRH5 targeting moiety that comprises an anti-FcRH5 antibody or antigen-binding fragment thereof described in U.S. Pat. No. 7,999,077, US20150098900, U.S. Pat. Nos. 8,299,220, 7,105,149, 8,362,213, 8,466,260, 8,617,559, US20160368985, US20150166661, and US20080247944, the entire contents of any of the aforesaid publications are herein incorporated by reference.

[0757] In some embodiments, the multispecific molecules described herein includes a FcRH5 targeting moiety that comprises an anti-FcRH5 antibody or antigen-binding fragment thereof described in U.S. Pat. No. 7,999,077, the entire contents of which are herein incorporated by reference.

### BCMA Targeting Moieties:

[0758] In certain embodiments, the multispecific molecules as described herein include a targeting moiety that binds to BCMA (e.g., a BCMA targeting moiety). The BCMA targeting moiety can be chosen from an antibody molecule (e.g., an antigen binding domain as described herein), a receptor or a receptor fragment, or a ligand or a ligand fragment, or a combination thereof. In some embodiments, the BCMA targeting moiety associates with, e.g., binds to, a cancer or hematopoietic cell (e.g., a molecule, e.g., antigen, present on the surface of the cancer or hematopoietic cell). In certain embodiments, the BCMA targeting moiety targets, e.g., directs the multispecific molecules as described herein to a cancer or hematopoietic cell. In some embodiments, the cancer is a hematological cancer, e.g., multiple myeloma.

[0759] In some embodiments, the multispecific molecule, e.g., the BCMA targeting moiety, binds to a BCMA antigen on the surface of a cell, e.g., a cancer or hematopoietic cell. The BCMA antigen can be present on a primary tumor cell, or a metastatic lesion thereof. In some embodiments, the cancer is a hematological cancer, e.g., multiple myeloma. For example, the BCMA antigen can be present on a tumor, e.g., a tumor of a class typified by having one or more of: limited tumor perfusion, compressed blood vessels, or fibrotic tumor interstitium.

[0760] Exemplary BCMA targeting moieties: the multispecific molecules described herein can include a BCMA targeting moiety that comprises an anti-BCMA antibody or antigen-binding fragment thereof described in U.S. Pat. Nos. 8,920,776, 9,243,058, 9,340,621, 8,846,042, 7,083,785, 9,545,086, 7,276,241, 9,034,324, 7,799,902, 9,387,237, 8,821,883, US861745, US20130273055, US20160176973, US20150368351, US20150376287, US20170022284, US20160015749, US20140242077, US20170037128, US20170051068, US20160368988, US20160311915, US20160131654, US20120213768, US20110177093, US20160297885, EP3137500, EP2699259, EP2982694, EP3029068, EP3023437, WO2016090327, WO2017021450, WO2016110584, WO2016118641, WO2016168149, the entire contents of which are incorporated herein by reference.

[0761] In some embodiments, the BCMA-targeting moiety includes an antibody molecule (e.g., Fab or scFv) that binds to BCMA. In some embodiments, the antibody molecule to BCMA comprises one, two, or three CDRs from any of the heavy chain variable domain sequences of Table 1, or a closely related CDR, e.g., CDRs which have at least one amino acid alteration, but not more than two, three or four alterations (e.g., substitutions, deletions, or insertions, e.g., conservative substitutions) from any of the CDR sequences of Table 15. In some embodiments, the antibody molecule to BCMA comprises a heavy chain variable domain sequence chosen from any of the amino acid sequences of Table 15, or an amino acid sequence substantially identical thereto (e.g., 95% to 99.9% identical thereto, or having at least one amino acid alteration, but not more than five, ten or fifteen alterations (e.g., substitutions, deletions, or insertions, e.g., conservative substitutions)).

[0762] Alternatively, or in combination with the heavy chain to BCMA as described herein, the antibody molecule to BCMA comprises one, two, or three CDRs from any of the light chain variable domain sequences of Table 15, or a closely related CDR, e.g., CDRs which have at least one amino acid alteration, but not more than two, three or four alterations (e.g., substitutions, deletions, or insertions, e.g., conservative substitutions) from any of the CDR sequences of Table 15. In some embodiments, the antibody molecule to BCMA comprises a light chain variable domain sequence chosen from any of the amino acid sequences of Table 15, or an amino acid sequence substantially identical thereto (e.g., 95% to 99.9% identical thereto, or having at least one amino acid alteration, but not more than five, ten or fifteen alterations (e.g., substitutions, deletions, or insertions, e.g., conservative substitutions)).

### Tumor-Targeting Moieties

[0763] In some embodiments, the multifunctional or multispecific (e.g., bi-, tri-, tetra-specific) molecules as described herein further include, e.g., are engineered to further contain, one or more tumor specific targeting moieties that direct the molecule to a tumor cell.

[0764] In certain embodiments, the multispecific molecules as described herein further include a tumor-targeting moiety. The tumor targeting moiety can be chosen from an antibody molecule (e.g., an antigen binding domain as described herein), a receptor or a receptor fragment, or a ligand or a ligand fragment, or a combination thereof. In some embodiments, the tumor targeting moiety associates with, e.g., binds to, a tumor cell (e.g., a molecule, e.g., antigen, present on the surface of the tumor cell). In certain embodiments, the tumor targeting moiety targets, e.g., directs the multispecific molecules as described herein to a cancer (e.g., a cancer or tumor cells). In some embodiments, the cancer is chosen from a hematological cancer, a solid cancer, a metastatic cancer, or a combination thereof.

[0765] In some embodiments, the multispecific molecule, e.g., the tumor-targeting moiety, binds to a solid tumor antigen or a stromal antigen. The solid tumor antigen or stromal antigen can be present on a solid tumor, or a metastatic lesion thereof. In some embodiments, the solid tumor is chosen from one or more of pancreatic (e.g., pancreatic adenocarcinoma), breast, colorectal, lung (e.g., small or non-small cell lung cancer), skin, ovarian, or liver cancer. In some embodiments, the solid tumor is a fibrotic or desmoplastic solid tumor. For example, the solid tumor antigen or stromal antigen can be present on a tumor, e.g., a tumor of a class typified by having one or more of: limited tumor perfusion, compressed blood vessels, or fibrotic tumor interstitium.

[0766] In certain embodiments, the solid tumor antigen is chosen from one or more of: PDL1, CD47, gangloside 2 (GD2), prostate stem cell antigen (PSCA), prostate specific membrane antigen (PMSA), prostate-specific antigen (PSA), carcinoembryonic antigen (CEA), Ron Kinase, c-Met, Immature laminin receptor, TAG-72, BING-4, Calcium-activated chloride channel 2, Cyclin-B1, 9D7, Ep-CAM, EphA3, Her2/neu, Telomerase, SAP-1, Survivin, NY-ESO-1/LAGE-1, PRAME, SSX-2, Melan-A/MART-1, Gp100/pmel17, Tyrosinase, TRP-1/-2, MC1R, β-catenin, BRCA1/2, CDK4, CML66, Fibronectin, p53, Ras, TGF-B receptor, AFP, ETA, MAGE, MUC-1, CA-125, BAGE, GAGE, NY-ESO-1, β-catenin, CDK4, CDC27, CD47, α actinin-4, TRP1/gp75, TRP2, gp100, Melan-A/MART1, gangliosides, WT1, EphA3, Epidermal growth factor receptor (EGFR), MART-2, MART-1, MUC1, MUC2, MUM1, MUM2, MUM3, NA88-1, NPM, OA1, OGT, RCC, RUI1, RUI2, SAGE, TRG, TRP1, TSTA, Folate receptor alpha, L1-CAM, CAIX, EGFRvIII, gpA33, GD3, GM2, VEGFR, Intergrins (Integrin alphaVbeta3, Integrin alpha5Beta1), Carbohydrates (Le), IGF1R, EPHA3, TRAILR1, TRAILR2, or RANKL.

[0767] In other embodiments, the multispecific molecule, e.g., the tumor-targeting moiety, binds to a molecule, e.g., antigen, present on the surface of a hematological cancer, e.g., a leukemia or a lymphoma. In some embodiments, the hematological cancer is a B-cell or T cell malignancy. In some embodiments, the hematological cancer is chosen from one or more of a Hodgkin's lymphoma, Non-Hodgkin's lymphoma (e.g., B cell lymphoma, diffuse large B cell lymphoma, follicular lymphoma, chronic lymphocytic leukemia, mantle cell lymphoma, marginal zone B-cell lymphoma, Burkitt lymphoma, lymphoplasmacytic lymphoma, hairy cell leukemia), acute myeloid leukemia (AML), chronic myeloid leukemia, myelodysplastic syndrome (MDS), multiple myeloma, or acute lymphocytic leukemia. In embodiments, the cancer is other than acute myeloid leukemia (AML) or myelodysplastic syndrome (MDS). In embodiments, the hematological antigen is chosen from CD47, CD99, CD30, CD38, SLAMF7, or NY-ESO1. In some embodiments, the hematological antigen is chosen from is chosen from one or more of BCMA, CD19, CD20, CD22, CD33, CD123, FcRH5, CLEC12, or CD179A.

### Antibody Molecules

[0768] In some embodiments, the antibody molecule binds to a cancer antigen, e.g., a tumor antigen or a stromal antigen. In some embodiments, the cancer antigen is, e.g., a mammalian, e.g., a human, cancer antigen. In other embodiments, the antibody molecule binds to an immune cell antigen, e.g., a mammalian, e.g., a human, immune cell antigen. For example, the antibody molecule binds specifically to an epitope, e.g., linear or conformational epitope, on the cancer antigen or the immune cell antigen.

[0769] In some embodiments, an antibody molecule is a monospecific antibody molecule and binds a single epitope. E.g., a monospecific antibody molecule having a plurality of immunoglobulin variable domain sequences, each of which binds the same epitope.

[0770] In some embodiments, an antibody molecule is a multispecific or multifunctional antibody molecule, e.g., it comprises a plurality of immunoglobulin variable domains sequences, wherein a first immunoglobulin variable domain sequence of the plurality has binding specificity for a first epitope and a second immunoglobulin variable domain sequence of the plurality has binding specificity for a second epitope. In some embodiments, the first and second epitopes are on the same antigen, e.g., the same protein (or subunit of a multimeric protein). In some embodiments, the first and second epitopes overlap. In some embodiments, the first and second epitopes do not overlap. In some embodiments, the first and second epitopes are on different antigens, e.g., the different proteins (or different subunits of a multimeric protein). In some embodiments, a multispecific antibody molecule comprises a third, fourth or fifth immunoglobulin variable domain. In some embodiments, a multispecific antibody molecule is a bispecific antibody molecule, a trispecific antibody molecule, or a tetraspecific antibody molecule.

[0771] In some embodiments, a multispecific antibody molecule is a bispecific antibody molecule. A bispecific antibody has specificity for no more than two antigens. A bispecific antibody molecule is characterized by a first immunoglobulin variable domain sequence which has binding specificity for a first epitope and a second immunoglobulin variable domain sequence that has binding specificity for a second epitope. In some embodiments, the first and second epitopes are on the same antigen, e.g., the same protein (or subunit of a multimeric protein). In some embodiments, the first and second epitopes overlap. In some embodiments, the first and second epitopes do not overlap. In some embodiments, the first and second epitopes are on different antigens, e.g., the different proteins (or different subunits of a multimeric protein). In some embodiments, a bispecific antibody molecule comprises a heavy chain variable domain sequence and a light chain variable domain sequence which have binding specificity for a first epitope and a heavy chain variable domain sequence and a light chain variable domain sequence which have binding specificity for a second epitope. In some embodiments, a bispecific antibody molecule comprises a half antibody having binding specificity for a first epitope and a half antibody having binding specificity for a second epitope. In some embodiments, a bispecific antibody molecule comprises a half antibody, or fragment thereof, having binding specificity for a first epitope and a half antibody, or fragment thereof, having binding specificity for a second epitope. In some embodiments, a bispecific antibody molecule comprises a scFv or a Fab, or fragment thereof, have binding specificity for a first epitope and a scFv or a Fab, or fragment thereof, have binding specificity for a second epitope.

[0772] In some embodiments, an antibody molecule comprises a diabody, and a single-chain molecule, as well as an antigen-binding fragment of an antibody (e.g., Fab, F(ab′)₂, and Fv). For example, an antibody molecule can include a heavy (H) chain variable domain sequence (abbreviated herein as VH), and a light (L) chain variable domain sequence (abbreviated herein as VL). In some embodiments, an antibody molecule comprises or consists of a heavy chain and a light chain (referred to herein as a half antibody. In another example, an antibody molecule includes two heavy (H) chain variable domain sequences and two light (L) chain variable domain sequence, thereby forming two antigen binding sites, such as Fab, Fab′, F(ab′)2, Fc, Fd, Fd′, Fv, single chain antibodies (scFv for example), single variable domain antibodies, diabodies (Dab) (bivalent and bispecific), and chimeric (e.g., humanized) antibodies, which may be produced by the modification of whole antibodies or those synthesized de novo using recombinant DNA technologies. These functional antibody fragments retain the ability to selectively bind with their respective antigen or receptor. Antibodies and antibody fragments can be from any class of antibodies including, but not limited to, IgG, IgA, IgM, IgD, and IgE, and from any subclass (e.g., IgG1, IgG2, IgG3, and IgG4) of antibodies. The preparation of antibody molecules can be monoclonal or polyclonal. An antibody molecule can also be a human, humanized, CDR-grafted, or in vitro generated antibody. The antibody can have a heavy chain constant region chosen from, e.g., IgG1, IgG2, IgG3, or IgG4. The antibody can also have a light chain chosen from, e.g., kappa or lambda. The term “immunoglobulin” (Ig) is used interchangeably with the term “antibody” herein.

[0773] Examples of antigen-binding fragments of an antibody molecule include: (i) a Fab fragment, a monovalent fragment consisting of the VL, VH, CL and CH1 domains; (ii) a F(ab′)2 fragment, a bivalent fragment comprising two Fab fragments linked by a disulfide bridge at the hinge region; (iii) a Fd fragment consisting of the VH and CH1 domains; (iv) a Fv fragment consisting of the VL and VH domains of a single arm of an antibody, (v) a diabody (dAb) fragment, which consists of a VH domain; (vi) a camelid or camelized variable domain; (vii) a single chain Fv (scFv), see e.g., Bird et al. (1988) Science 242:423-426; and Huston et al. (1988) Proc. Natl. Acad. Sci. USA 85:5879-5883); (viii) a single domain antibody. These antibody fragments are obtained using conventional techniques known to those with skill in the art, and the fragments are screened for utility in the same manner as are intact antibodies.

[0774] Antibody molecules include intact molecules as well as functional fragments thereof. Constant regions of the antibody molecules can be altered, e.g., mutated, to modify the properties of the antibody (e.g., to increase or decrease one or more of: Fc receptor binding, antibody glycosylation, the number of cysteine residues, effector cell function, or complement function).

[0775] Antibody molecules can also be single domain antibodies. Single domain antibodies can include antibodies whose complementary determining regions are part of a single domain polypeptide. Examples include, but are not limited to, heavy chain antibodies, antibodies naturally devoid of light chains, single domain antibodies derived from conventional 4-chain antibodies, engineered antibodies and single domain scaffolds other than those derived from antibodies. Single domain antibodies may be any of the art, or any future single domain antibodies. Single domain antibodies may be derived from any species including, but not limited to mouse, human, camel, llama, fish, shark, goat, rabbit, and bovine. According to another aspect of the invention, a single domain antibody is a naturally occurring single domain antibody known as heavy chain antibody devoid of light chains. Such single domain antibodies are disclosed in WO 9404678, for example. For clarity reasons, this variable domain derived from a heavy chain antibody naturally devoid of light chain is known herein as a VHH or nanobody to distinguish it from the conventional VH of four chain immunoglobulins. Such a VHH molecule can be derived from antibodies raised in Camelidae species, for example in camel, llama, dromedary, alpaca and guanaco. Other species besides Camelidae may produce heavy chain antibodies naturally devoid of light chain; such VHHs are within the scope of the invention.

[0776] The VH and VL regions can be subdivided into regions of hypervariability, termed “complementarity determining regions” (CDR), interspersed with regions that are more conserved, termed “framework regions” (FR or FW).

[0777] The extent of the framework region and CDRs has been precisely defined by a number of methods (see, Kabat, E. A., et al. (1991) Sequences of Proteins of Immunological Interest, Fifth Edition, U.S. Department of Health and Human Services, NIH Publication No. 91-3242; Chothia, C. et al. (1987) J. Mol. Biol. 196:901-917; and the AbM definition used by Oxford Molecular's AbM antibody modeling software. See, generally, e.g., Protein Sequence and Structure Analysis of Antibody Variable Domains. In: Antibody Engineering Lab Manual (Ed.: Duebel, S. and Kontermann, R., Springer-Verlag, Heidelberg).

[0778] The terms “complementarity determining region,” and “CDR,” as used herein refer to the sequences of amino acids within antibody variable regions which confer antigen specificity and binding affinity. In general, there are three CDRs in each heavy chain variable region (HCDR1, HCDR2, HCDR3) and three CDRs in each light chain variable region (LCDR1, LCDR2, LCDR3).

[0779] The precise amino acid sequence boundaries of a given CDR can be determined using any of a number of known schemes, including those described by Kabat et al. (1991), “Sequences of Proteins of Immunological Interest,” 5th Ed. Public Health Service, National Institutes of Health, Bethesda, MD (“Kabat” numbering scheme), Al-Lazikani et al., (1997) JMB 273,927-948 (“Chothia” numbering scheme). As used herein, the CDRs defined according the “Chothia” number scheme are also sometimes referred to as “hypervariable loops.”

[0780] For example, under Kabat, the CDR amino acid residues in the heavy chain variable domain (VH) are numbered 31-35 (HCDR1), 50-65 (HCDR2), and 95-102 (HCDR3); and the CDR amino acid residues in the light chain variable domain (VL) are numbered 24-34 (LCDR1), 50-56 (LCDR2), and 89-97 (LCDR3). Under Chothia, the CDR amino acids in the VH are numbered 26-32 (HCDR1), 52-56 (HCDR2), and 95-102 (HCDR3); and the amino acid residues in VL are numbered 26-32 (LCDR1), 50-52 (LCDR2), and 91-96 (LCDR3).

[0781] Each VH and VL typically includes three CDRs and four FRs, arranged from amino-terminus to carboxy-terminus in the following order: FR1, CDR1, FR2, CDR2, FR3, CDR3, FR4.

[0782] The antibody molecule can be a polyclonal or a monoclonal antibody.

[0783] The terms “monoclonal antibody” or “monoclonal antibody composition” as used herein refer to a preparation of antibody molecules of single molecular composition. A monoclonal antibody composition displays a single binding specificity and affinity for a particular epitope. A monoclonal antibody can be made by hybridoma technology or by methods that do not use hybridoma technology (e.g., recombinant methods).

[0784] The antibody can be recombinantly produced, e.g., produced by phage display or by combinatorial methods, or by yeast display.

[0785] Phage display and combinatorial methods for generating antibodies are known in the art (as described in, e.g., Ladner et al. U.S. Pat. No. 5,223,409; Kang et al. International Publication No. WO 92/18619; Dower et al. International Publication No. WO 91/17271; Winter et al. International Publication WO 92/20791; Markland et al. International Publication No. WO 92/15679; Breitling et al. International Publication WO 93/01288; McCafferty et al. International Publication No. WO 92/01047; Garrard et al. International Publication No. WO 92/09690; Ladner et al. International Publication No. WO 90/02809; Fuchs et al. (1991) Bio/Technology 9:1370-1372; Hay et al. (1992) Hum Antibod Hybridomas 3:81-85; Huse et al. (1989) Science 246:1275-1281; Griffths et al. (1993) EMBO J 12:725-734; Hawkins et al. (1992) J Mol Biol 226:889-896; Clackson et al. (1991) Nature 352:624-628; Gram et al. (1992) PNAS 89:3576-3580; Garrad et al. (1991) Bio/Technology 9:1373-1377; Hoogenboom et al. (1991) Nuc Acid Res 19:4133-4137; and Barbas et al. (1991) PNAS 88:7978-7982, the contents of all of which are incorporated by reference herein).

[0786] The yeast display method for generating or identifying antibodies is known in the art, e.g., as described in Chao et al. (2006) Nature Protocols 1(2):755-68, the entire contents of which is incorporated by reference herein.

[0787] In some embodiments, the antibody is a fully human antibody (e.g., an antibody made in a mouse which has been genetically engineered to produce an antibody from a human immunoglobulin sequence), or a non-human antibody, e.g., a rodent (mouse or rat), goat, primate (e.g., monkey), camel antibody. Preferably, the non-human antibody is a rodent (mouse or rat antibody). Methods of producing rodent antibodies are known in the art.

[0788] Human monoclonal antibodies can be generated using transgenic mice carrying the human immunoglobulin genes rather than the mouse system. Splenocytes from these transgenic mice immunized with the antigen of interest are used to produce hybridomas that secrete human mAbs with specific affinities for epitopes from a human protein (see, e.g., Wood et al. International Application WO 91/00906, Kucherlapati et al. PCT publication WO 91/10741; Lonberg et al. International Application WO 92/03918; Kay et al. International Application 92/03917; Lonberg, N. et al. 1994 Nature 368:856-859; Green, L. L. et al. 1994 Nature Genet. 7:13-21; Morrison, S. L. et al. 1994 Proc. Natl. Acad. Sci. USA 81:6851-6855; Bruggeman et al. 1993 Year Immunol 7:33-40; Tuaillon et al. 1993 PNAS 90:3720-3724; Bruggeman et al. 1991 Eur J Immunol 21:1323-1326).

[0789] An antibody molecule can be one in which the variable region, or a portion thereof, e.g., the CDRs, are generated in a non-human organism, e.g., a rat or mouse. Chimeric, CDR-grafted, and humanized antibodies are within the invention. Antibody molecules generated in a non-human organism, e.g., a rat or mouse, and then modified, e.g., in the variable framework or constant region, to decrease antigenicity in a human are within the invention.

[0790] An “effectively human” protein is a protein that does substantially not evoke a neutralizing antibody response, e.g., the human anti-murine antibody (HAMA) response. HAMA can be problematic in a number of circumstances, e.g., if the antibody molecule is administered repeatedly, e.g., in treatment of a chronic or recurrent disease condition. A HAMA response can make repeated antibody administration potentially ineffective because of an increased antibody clearance from the serum (see, e.g., Saleh et al., Cancer Immunol. Immunother., 32:180-190 (1990)) and also because of potential allergic reactions (see, e.g., LoBuglio et al., Hybridoma, 5:5117-5123 (1986)).

[0791] Chimeric antibodies can be produced by recombinant DNA techniques known in the art (see Robinson et al., International Patent Publication PCT/US86/02269; Akira, et al., European Patent Application 184,187; Taniguchi, M., European Patent Application 171,496; Morrison et al., European Patent Application 173,494; Neuberger et al., International Application WO 86/01533; Cabilly et al. U.S. Pat. No. 4,816,567; Cabilly et al., European Patent Application 125,023; Better et al. (1988 Science 240:1041-1043); Liu et al. (1987) PNAS 84:3439-3443; Liu et al., 1987, J. Immunol. 139:3521-3526; Sun et al. (1987) PNAS 84:214-218; Nishimura et al., 1987, Canc. Res. 47:999-1005; Wood et al. (1985) Nature 314:446-449; and Shaw et al., 1988, J. Natl Cancer Inst. 80:1553-1559).

[0792] A humanized or CDR-grafted antibody will have at least one or two but generally all three recipient CDRs (of heavy and or light immuoglobulin chains) replaced with a donor CDR. The antibody may be replaced with at least a portion of a non-human CDR or only some of the CDRs may be replaced with non-human CDRs. It is only necessary to replace the number of CDRs required for binding to the antigen. Preferably, the donor will be a rodent antibody, e.g., a rat or mouse antibody, and the recipient will be a human framework or a human consensus framework. Typically, the immunoglobulin providing the CDRs is called the “donor” and the immunoglobulin providing the framework is called the “acceptor.” In some embodiments, the donor immunoglobulin is a non-human (e.g., rodent). The acceptor framework is a naturally-occurring (e.g., a human) framework or a consensus framework, or a sequence about 85% or higher, preferably 90%, 95%, 99% or higher identical thereto.

[0793] As used herein, the term “consensus sequence” refers to the sequence formed from the most frequently occurring amino acids (or nucleotides) in a family of related sequences (See e.g., Winnaker, From Genes to Clones (Verlagsgesellschaft, Weinheim, Germany 1987). In a family of proteins, each position in the consensus sequence is occupied by the amino acid occurring most frequently at that position in the family. If two amino acids occur equally frequently, either can be included in the consensus sequence. A “consensus framework” refers to the framework region in the consensus immunoglobulin sequence.

[0794] An antibody molecule can be humanized by methods known in the art (see e.g., Morrison, S. L., 1985, Science 229:1202-1207, by Oi et al., 1986, BioTechniques 4:214, and by Queen et al. U.S. Pat. Nos. 5,585,089, 5,693,761 and 5,693,762, the contents of all of which are hereby incorporated by reference).

[0795] Humanized or CDR-grafted antibody molecules can be produced by CDR-grafting or CDR substitution, wherein one, two, or all CDRs of an immunoglobulin chain can be replaced. See e.g., U.S. Pat. No. 5,225,539; Jones et al. 1986 Nature 321:552-525; Verhoeyan et al. 1988 Science 239:1534; Beidler et al. 1988 J. Immunol. 141:4053-4060; Winter U.S. Pat. No. 5,225,539, the contents of all of which are hereby expressly incorporated by reference. Winter describes a CDR-grafting method which may be used to prepare the humanized antibodies of the present invention (UK Patent Application GB 2188638A, filed on Mar. 26, 1987; Winter U.S. Pat. No. 5,225,539), the contents of which is expressly incorporated by reference.

[0796] Also within the scope of the invention are humanized antibody molecules in which specific amino acids have been substituted, deleted or added. Criteria for selecting amino acids from the donor are described in U.S. Pat. No. 5,585,089, e.g., columns 12-16 of U.S. Pat. No. 5,585,089, e.g., columns 12-16 of U.S. Pat. No. 5,585,089, the contents of which are hereby incorporated by reference. Other techniques for humanizing antibodies are described in Padlan et al. EP 519596 A1, published on Dec. 23, 1992.

[0797] The antibody molecule can be a single chain antibody. A single-chain antibody (scFV) may be engineered (see, for example, Colcher, D. et al. (1999) Ann N Y Acad Sci 880:263-80; and Reiter, Y. (1996) Clin Cancer Res 2:245-52). The single chain antibody can be dimerized or multimerized to generate multivalent antibodies having specificities for different epitopes of the same target protein.

[0798] In yet other embodiments, the antibody molecule has a heavy chain constant region chosen from, e.g., the heavy chain constant regions of IgG1, IgG2, IgG3, IgG4, IgM, IgA1, IgA2, IgD, and IgE; particularly, chosen from, e.g., the (e.g., human) heavy chain constant regions of IgG1, IgG2, IgG3, and IgG4. In another embodiment, the antibody molecule has a light chain constant region chosen from, e.g., the (e.g., human) light chain constant regions of kappa or lambda. The constant region can be altered, e.g., mutated, to modify the properties of the antibody (e.g., to increase or decrease one or more of: Fc receptor binding, antibody glycosylation, the number of cysteine residues, effector cell function, and/or complement function). In some embodiments the antibody has: effector function; and can fix complement. In other embodiments the antibody does not; recruit effector cells; or fix complement. In another embodiment, the antibody has reduced or no ability to bind an Fc receptor. For example, it is a isotype or subtype, fragment or other mutant, which does not support binding to an Fc receptor, e.g., it has a mutagenized or deleted Fc receptor binding region.

[0799] Methods for altering an antibody constant region are known in the art. Antibodies with altered function, e.g. altered affinity for an effector ligand, such as FcR on a cell, or the C1 component of complement can be produced by replacing at least one amino acid residue in the constant portion of the antibody with a different residue (see e.g., EP 388,151 A1, U.S. Pat. Nos. 5,624,821 and 5,648,260, the contents of all of which are hereby incorporated by reference). Similar type of alterations could be described which if applied to the murine, or other species immunoglobulin would reduce or eliminate these functions.

[0800] An antibody molecule can be derivatized or linked to another functional molecule (e.g., another peptide or protein). As used herein, a “derivatized” antibody molecule is one that has been modified. Methods of derivatization include but are not limited to the addition of a fluorescent moiety, a radionucleotide, a toxin, an enzyme or an affinity ligand such as biotin. Accordingly, the antibody molecules of the invention are intended to include derivatized and otherwise modified forms of the antibodies described herein, including immunoadhesion molecules. For example, an antibody molecule can be functionally linked (by chemical coupling, genetic fusion, noncovalent association or otherwise) to one or more other molecular entities, such as another antibody (e.g., a bispecific antibody or a diabody), a detectable agent, a cytotoxic agent, a pharmaceutical agent, and/or a protein or peptide that can mediate association of the antibody or antibody portion with another molecule (such as a streptavidin core region or a polyhistidine tag).

[0801] One type of derivatized antibody molecule is produced by crosslinking two or more antibodies (of the same type or of different types, e.g., to create bispecific antibodies). Suitable crosslinkers include those that are heterobifunctional, having two distinctly reactive groups separated by an appropriate spacer (e.g., m-maleimidobenzoyl-N-hydroxysuccinimide ester) or homobifunctional (e.g., disuccinimidyl suberate). Such linkers are available from Pierce Chemical Company, Rockford, Ill.

### CDR-Grafted Scaffolds

[0802] In some embodiments, the antibody molecule is a CDR-grafted scaffold domain. In some embodiments, the scaffold domain is based on a fibronectin domain, e.g., fibronectin type III domain. The overall fold of the fibronectin type III (Fn3) domain is closely related to that of the smallest functional antibody fragment, the variable domain of the antibody heavy chain. There are three loops at the end of Fn3; the positions of BC, DE and FG loops approximately correspond to those of CDR1, 2 and 3 of the VH domain of an antibody. Fn3 does not have disulfide bonds; and therefore Fn3 is stable under reducing conditions, unlike antibodies and their fragments (see, e.g., WO 98/56915; WO 01/64942; WO 00/34784). An Fn3 domain can be modified (e.g., using CDRs or hypervariable loops described herein) or varied, e.g., to select domains that bind to an antigen/marker/cell described herein.

[0803] In some embodiments, a scaffold domain, e.g., a folded domain, is based on an antibody, e.g., a “minibody” scaffold created by deleting three beta strands from a heavy chain variable domain of a monoclonal antibody (see, e.g., Tramontano et al., 1994, J Mol. Recognit. 7:9; and Martin et al., 1994, EMBO J. 13:5303-5309). The “minibody” can be used to present two hypervariable loops. In some embodiments, the scaffold domain is a V-like domain (see, e.g., Coia et al. WO 99/45110) or a domain derived from tendamistatin, which is a 74 residue, six-strand beta sheet sandwich held together by two disulfide bonds (see, e.g., McConnell and Hoess, 1995, J Mol. Biol. 250:460). For example, the loops of tendamistatin can be modified (e.g., using CDRs or hypervariable loops) or varied, e.g., to select domains that bind to a marker/antigen/cell described herein. Another exemplary scaffold domain is a beta-sandwich structure derived from the extracellular domain of CTLA-4 (see, e.g., WO 00/60070).

[0804] Other exemplary scaffold domains include but are not limited to T-cell receptors; MHC proteins; extracellular domains (e.g., fibronectin Type III repeats, EGF repeats); protease inhibitors (e.g., Kunitz domains, ecotin, BPTI, and so forth); TPR repeats; trifoil structures; zinc finger domains; DNA-binding proteins; particularly monomeric DNA binding proteins; RNA binding proteins; enzymes, e.g., proteases (particularly inactivated proteases), RNase; chaperones, e.g., thioredoxin, and heat shock proteins; and intracellular signaling domains (such as SH2 and SH3 domains). See, e.g., US 20040009530 and U.S. Pat. No. 7,501,121, incorporated herein by reference.

[0805] In some embodiments, a scaffold domain is evaluated and chosen, e.g., by one or more of the following criteria: (1) amino acid sequence, (2) sequences of several homologous domains, (3) 3-dimensional structure, and/or (4) stability data over a range of pH, temperature, salinity, organic solvent, oxidant concentration. In some embodiments, the scaffold domain is a small, stable protein domain, e.g., a protein of less than 100, 70, 50, 40 or 30 amino acids. The domain may include one or more disulfide bonds or may chelate a metal, e.g., zinc.

### Antibody-Based Fusions

[0806] A variety of formats can be generated which contain additional binding entities attached to the N or C terminus of antibodies. These fusions with single chain or disulfide stabilized Fvs or Fabs result in the generation of tetravalent molecules with bivalent binding specificity for each antigen. Combinations of scFvs and scFabs with IgGs enable the production of molecules which can recognize three or more different antigens.

### Antibody-Fab Fusion

[0807] Antibody-Fab fusions are bispecific antibodies comprising a traditional antibody to a first target and a Fab to a second target fused to the C terminus of the antibody heavy chain. Commonly the antibody and the Fab will have a common light chain. Antibody fusions can be produced by (1) engineering the DNA sequence of the target fusion, and (2) transfecting the target DNA into a suitable host cell to express the fusion protein. It seems like the antibody-scFv fusion may be linked by a (Gly)-Ser linker between the C-terminus of the CH3 domain and the N-terminus of the scFv, as described by Coloma, J. et al. (1997) Nature Biotech 15:159.

### Antibody-scFv Fusion

[0808] Antibody-scFv Fusions are bispecific antibodies comprising a traditional antibody and a scFv of unique specificity fused to the C terminus of the antibody heavy chain. The scFv can be fused to the C terminus through the Heavy Chain of the scFv either directly or through a linker peptide. Antibody fusions can be produced by (1) engineering the DNA sequence of the target fusion, and (2) transfecting the target DNA into a suitable host cell to express the fusion protein. It seems like the antibody-scFv fusion may be linked by a (Gly)-Ser linker between the C-terminus of the CH3 domain and the N-terminus of the scFv, as described by Coloma, J. et al. (1997) Nature Biotech 15:159.

### Variable Domain Immunoglobulin DVD

[0809] A related format is the dual variable domain immunoglobulin (DVD), which are composed of VH and VL domains of a second specificity place upon the N termini of the V domains by shorter linker sequences.

[0810] Other exemplary multispecific antibody formats include, e.g., those described in the following US20160114057A1, US20130243775A1, US20140051833, US20130022601, US20150017187A1, US20120201746A1, US20150133638A1, US20130266568A1, US20160145340A1, WO2015127158A1, US20150203591A1, US20140322221A1, US20130303396A1, US20110293613, US20130017200A1, US20160102135A1, WO2015197598A2, WO2015197582A1, U.S. Pat. No. 9,359,437, US20150018529, WO2016115274A1, WO2016087416A1, US20080069820A1, U.S. Pat. Nos. 9,145,588B, 7,919,257, and US20150232560A1. Exemplary multispecific molecules utilizing a full antibody-Fab/scFab format include those described in the following, U.S. Pat. No. 9,382,323B2, US20140072581A1, US20140308285A1, US20130165638A1, US20130267686A1, US20140377269A1, U.S. Pat. No. 7,741,446B2, and WO1995009917A1. Exemplary multispecific molecules utilizing a domain exchange format include those described in the following, US20150315296A1, WO2016087650A1, US20160075785A1, WO2016016299A1, US20160130347A1, US20150166670, U.S. Pat. No. 8,703,132B2, US20100316645, U.S. Pat. No. 8,227,577B2, US20130078249.

### Fc-Containing Multispecific Molecules

[0811] In some embodiments, the multispecific molecules as described herein includes an immunoglobulin constant region (e.g., an Fc region). Exemplary Fc regions can be chosen from the heavy chain constant regions of IgG1, IgG2, IgG3 or IgG4; more particularly, the heavy chain constant region of human IgG1, IgG2, IgG3, or IgG4.

[0812] In some embodiments, the immunoglobulin chain constant region (e.g., the Fc region) is altered, e.g., mutated, to increase or decrease one or more of: Fc receptor binding, antibody glycosylation, the number of cysteine residues, effector cell function, or complement function.

[0813] In other embodiments, an interface of a first and second immunoglobulin chain constant regions (e.g., a first and a second Fc region) is altered, e.g., mutated, to increase or decrease dimerization, e.g., relative to a non-engineered interface, e.g., a naturally-occurring interface. For example, dimerization of the immunoglobulin chain constant region (e.g., the Fc region) can be enhanced by providing an Fe interface of a first and a second Fc region with one or more of: a paired protuberance-cavity (“knob-in-a hole”), an electrostatic interaction, or a strand-exchange, such that a greater ratio of heteromultimer to homomultimer forms, e.g., relative to a non-engineered interface.

[0814] In some embodiments, the multispecific molecules include a paired amino acid substitution at a position chosen from one or more of 347, 349, 350, 351, 366, 368, 370, 392, 394, 395, 397, 398, 399, 405, 407, or 409, e.g., of the Fc region of human IgG1 For example, the immunoglobulin chain constant region (e.g., Fc region) can include a paired an amino acid substitution chosen from: T366S, L368A, or Y407V (e.g., corresponding to a cavity or hole), and T366W (e.g., corresponding to a protuberance or knob).

[0815] In other embodiments, the multifunctional molecule includes a half-life extender, e.g., a human serum albumin or an antibody molecule to human serum albumin.

[0816] In some embodiments, Fc contains exemplary Fc modifications listed in Table 14.

### Heterodimerized Antibody Molecules & Methods of Making

[0817] Various methods of producing multispecific antibodies have been disclosed to address the problem of incorrect heavy chain pairing. Exemplary methods are described below. Exemplary multispecific antibody formats and methods of making said multispecific antibodies are also disclosed in e.g., Speiss et al. Molecular Immunology 67 (2015) 95-106; and Klein et al mAbs 4:6, 653-663; November/December 2012; the entire contents of each of which are incorporated by reference herein.

[0818] Heterodimerized bispecific antibodies are based on the natural IgG structure, wherein the two binding arms recognize different antigens. IgG derived formats that enable defined monovalent (and simultaneous) antigen binding are generated by forced heavy chain heterodimerization, combined with technologies that minimize light chain mispairing (e.g., common light chain). Forced heavy chain heterodimerization can be obtained using, e.g., knob-in-hole OR strand exchange engineered domains (SEED).

### Knob-In-Hole

[0819] Knob-in-Hole as described in U.S. Pat. Nos. 5,731,116, 7,476,724 and Ridgway, J. et al. (1996) Prot. Engineering 9(7): 617-621, broadly involves: (1) mutating the CH3 domain of one or both antibodies to promote heterodimerization; and (2) combining the mutated antibodies under conditions that promote heterodimerization. “Knobs” or “protuberances” are typically created by replacing a small amino acid in a parental antibody with a larger amino acid (e.g., T366Y or T366W); “Holes” or “cavities” are created by replacing a larger residue in a parental antibody with a smaller amino acid (e.g., Y407T, T366S, L368A and/or Y407V).

[0820] For bispecific antibodies including an Fc domain, introduction of specific mutations into the constant region of the heavy chains to promote the correct heterodimerization of the Fc portion can be utilized. Several such techniques are reviewed in Klein et al. (mAbs (2012) 4:6, 1-11), the contents of which are incorporated herein by reference in their entirety. These techniques include the “knobs-into-holes” (KiH) approach which involves the introduction of a bulky residue into one of the CH3 domains of one of the antibody heavy chains. This bulky residue fits into a complementary “hole” in the other CH3 domain of the paired heavy chain so as to promote correct pairing of heavy chains (see e.g., U.S. Pat. No. 7,642,228).

[0821] Exemplary KiH mutations include S354C, T366W in the “knob” heavy chain and Y349C, T366S, L368A, Y407V in the “hole” heavy chain. Other exemplary KiH mutations are provided in Table 4, with additional optional stabilizing Fc cysteine mutations.

[0822] Other Fc mutations are provided by Igawa and Tsunoda who identified 3 negatively charged residues in the CH3 domain of one chain that pair with three positively charged residues in the CH3 domain of the other chain. These specific charged residue pairs are: E356-K439, E357-K370, D399-K409 and vice versa. By introducing at least two of the following three mutations in chain A: E356K, E357K and D399K, as well as K370E, K409D, K439E in chain B, alone or in combination with newly identified disulfide bridges, they were able to favor very efficient heterodimerization while suppressing homodimerization at the same time (Martens T et al. A novel one-armed antic-Met antibody inhibits glioblastoma growth in vivo. Clin Cancer Res 2006; 12:6144-52; PMID:17062691). Xencor defined 41 variant pairs based on combining structural calculations and sequence information that were subsequently screened for maximal heterodimerization, defining the combination of S364H, F405A (HA) on chain A and Y349T, T394F on chain B (TF) (Moore G L et al. A novel bispecific antibody format enables simultaneous bivalent and monovalent co-engagement of distinct target antigens. MAbs 2011; 3:546-57; PMID: 22123055).

[0823] Other exemplary Fc mutations to promote heterodimerization of multispecific antibodies include those described in the following references, the contents of each of which is incorporated by reference herein, WO2016071377A1, US20140079689A1, US20160194389A1, US20160257763, WO2016071376A2, WO2015107026A1, WO2015107025A1, WO2015107015A1, US20150353636A1, US20140199294A1, U.S. Pat. No. 7,750,128B2, US20160229915A1, US20150344570A1, U.S. Pat. No. 8,003,774A1, US20150337049A1, US20150175707A1, US20140242075A1, US20130195849A1, US20120149876A1, US20140200331A1, U.S. Pat. No. 9,309,311B2, U.S. Pat. No. 8,586,713, US20140037621A1, US20130178605A1, US20140363426A1, US20140051835A1 and US20110054151A1.

[0824] Stabilizing cysteine mutations have also been used in combination with KiH and other Fc heterodimerization promoting variants, see e.g., U.S. Pat. No. 7,183,076. Other exemplary cysteine modifications include, e.g., those disclosed in US20140348839A1, U.S. Pat. No. 7,855,275B2, and U.S. Pat. No. 9,000,130B2.

### Strand Exchange Engineered Domains (SEED)

[0825] Heterodimeric Fc platform that support the design of bispecific and asymmetric fusion proteins by devising strand-exchange engineered domain (SEED) C(H)3 heterodimers are known. These derivatives of human IgG and IgA C(H)3 domains create complementary human SEED C(H)3 heterodimers that are composed of alternating segments of human IgA and IgG C(H)3 sequences. The resulting pair of SEED C(H)3 domains preferentially associates to form heterodimers when expressed in mammalian cells. SEEDbody (Sb) fusion proteins consist of [IgG1 hinge]-C(H)2-[SEED C(H)3], that may be genetically linked to one or more fusion partners (see e.g., Davis J H et al. SEEDbodies: fusion proteins based on strand exchange engineered domain (SEED) CH3 heterodimers in an Fe analogue platform for asymmetric binders or immunofusions and bispecific antibodies. Protein Eng Des Sel 2010; 23:195-202; PMID:20299542 and U.S. Pat. No. 8,871,912. The contents of each of which are incorporated by reference herein).

### Fc-Containing Entities (Mini-Antibodies)

[0826] Fc-containing entities, also known as mini-antibodies, can be generated by fusing scFv to the C-termini of constant heavy region domain 3 (CH3-scFv) and/or to the hinge region (scFv-hinge-Fc) of an antibody with a different specificity. Trivalent entities can also be made which have disulfide stabilized variable domains (without peptide linker) fused to the C-terminus of CH3 domains of IgGs.

### Duobody

[0827] “Duobody” technology to produce bispecific antibodies with correct heavy chain pairing are known. The DuoBody technology involves three basic steps to generate stable bispecific human IgG1 antibodies in a post-production exchange reaction. In a first step, two IgG1s, each containing single matched mutations in the third constant (CH3) domain, are produced separately using standard mammalian recombinant cell lines. Subsequently, these IgG1 antibodies are purified according to standard processes for recovery and purification. After production and purification (post-production), the two antibodies are recombined under tailored laboratory conditions resulting in a bispecific antibody product with a very high yield (typically >95%) (see e.g., Labrijn et al, PNAS 2013; 110(13):5145-5150 and Labrijn et al. Nature Protocols 2014; 9(10):2450-63, the contents of each of which are incorporated by reference herein).

### Electrostatic Interactions

[0828] Methods of making multispecific antibodies using CH3 amino acid changes with charged amino acids such that homodimer formation is electrostatically unfavorable are disclosed. EP1870459 and WO 2009089004 describe other strategies for favoring heterodimer formation upon co-expression of different antibody domains in a host cell. In these methods, one or more residues that make up the heavy chain constant domain 3 (CH3), CH3-CH3 interfaces in both CH3 domains are replaced with a charged amino acid such that homodimer formation is electrostatically unfavorable and heterodimerization is electrostatically favorable. Additional methods of making multispecific molecules using electrostatic interactions are described in the following references, the contents of each of which is incorporated by reference herein, include US20100015133, U.S. Pat. No. 8,592,562B2, U.S. Pat. No. 9,200,060B2, US20140154254A1, and U.S. Pat. No. 9,358,286A1.

### Common Light Chain

[0829] Light chain mispairing needs to be avoided to generate homogenous preparations of bispecific IgGs. One way to achieve this is through the use of the common light chain principle, i.e. combining two binders that share one light chain but still have separate specificities. An exemplary method of enhancing the formation of a desired bispecific antibody from a mixture of monomers is by providing a common variable light chain to interact with each of the heteromeric variable heavy chain regions of the bispecific antibody. Compositions and methods of producing bispecific antibodies with a common light chain as disclosed in, e.g., U.S. Pat. No. 7,183,076B2, US20110177073A1, EP2847231A1, WO2016079081A1, and EP3055329A1, the contents of each of which is incorporated by reference herein.

### CrossMab

[0830] Another option to reduce light chain mispairing is the CrossMab technology which avoids non-specific L chain mispairing by exchanging CH1 and CL domains in the Fab of one half of the bispecific antibody. Such crossover variants retain binding specificity and affinity, but make the two arms so different that L chain mispairing is prevented. The CrossMab technology (as reviewed in Klein et al. Supra) involves domain swapping between heavy and light chains so as to promote the formation of the correct pairings. Briefly, to construct a bispecific IgG-like CrossMab antibody that could bind to two antigens by using two distinct light chain-heavy chain pairs, a two-step modification process is applied. First, a dimerization interface is engineered into the C-terminus of each heavy chain using a heterodimerization approach, e.g., Knob-into-hole (KiH) technology, to ensure that only a heterodimer of two distinct heavy chains from one antibody (e.g., Antibody A) and a second antibody (e.g., Antibody B) is efficiently formed. Next, the constant heavy 1 (CH1) and constant light (CL) domains of one antibody are exchanged (Antibody A), keeping the variable heavy (VH) and variable light (VL) domains consistent. The exchange of the CH1 and CL domains ensured that the modified antibody (Antibody A) light chain would only efficiently dimerize with the modified antibody (antibody A) heavy chain, while the unmodified antibody (Antibody B) light chain would only efficiently dimerize with the unmodified antibody (Antibody B) heavy chain; and thus only the desired bispecific CrossMab would be efficiently formed (see e.g., Cain, C. SciBX 4(28); doi:10.1038/scibx.2011.783, the contents of which are incorporated by reference herein).

### Common Heavy Chain

[0831] An exemplary method of enhancing the formation of a desired bispecific antibody from a mixture of monomers is by providing a common variable heavy chain to interact with each of the heteromeric variable light chain regions of the bispecific antibody. Compositions and methods of producing bispecific antibodies with a common heavy chain are disclosed in, e.g., US20120184716, US20130317200, and US20160264685A1, the contents of each of which is incorporated by reference herein.

### Amino Acid Modifications

[0832] Alternative compositions and methods of producing multispecific antibodies with correct light chain pairing include various amino acid modifications. For example, Zymeworks describes heterodimers with one or more amino acid modifications in the CH1 and/or CL domains, one or more amino acid modifications in the VH and/or VL domains, or a combination thereof, which are part of the interface between the light chain and heavy chain and create preferential pairing between each heavy chain and a desired light chain such that when the two heavy chains and two light chains of the heterodimer pair are co-expressed in a cell, the heavy chain of the first heterodimer preferentially pairs with one of the light chains rather than the other (see e.g., WO2015181805). Other exemplary methods are described in WO2016026943 (Argen-X), US20150211001, US20140072581A1, US20160039947A1, and US20150368352.

### Lambda Kappa Formats

[0833] Multispecific molecules (e.g., multispecific antibody molecules) that include the lambda light chain polypeptide and a kappa light chain polypeptides, can be used to allow for heterodimerization. Methods for generating bispecific antibody molecules comprising the lambda light chain polypeptide and a kappa light chain polypeptides are disclosed in PCT/US17/53053 filed on Sep. 22, 2017 and designated publication number WO 2018/057955, incorporated herein by reference in its entirety.

[0834] In some embodiments, the multispecific molecule includes a multispecific antibody molecule, e.g., an antibody molecule comprising two binding specificities, e.g., a bispecific antibody molecule. The multispecific antibody molecule includes:
[0835] a lambda light chain polypeptide 1 (LLCP1) specific for a first epitope;
[0836] a heavy chain polypeptide 1 (HCP1) specific for the first epitope;
[0837] a kappa light chain polypeptide 2 (KLCP2) specific for a second epitope; and
[0838] a heavy chain polypeptide 2 (HCP2) specific for the second epitope.

[0839] “Lambda light chain polypeptide 1 (LLCP1)”, as that term is used herein, refers to a polypeptide comprising sufficient light chain (LC) sequence, such that when combined with a cognate heavy chain variable region, can mediate specific binding to its epitope and complex with an HCP1. In some embodiments, it comprises all or a fragment of a CH1 region. In some embodiments, an LLCP1 comprises LC-CDR1, LC-CDR2, LC-CDR3, FR1, FR2, FR3, FR4, and CH1, or sufficient sequence therefrom to mediate specific binding of its epitope and complex with an HCP1. LLCP1, together with its HCP1, provide specificity for a first epitope (while KLCP2, together with its HCP2, provide specificity for a second epitope). As described elsewhere herein, LLCP1 has a higher affinity for HCP1 than for HCP2.

[0840] “Kappa light chain polypeptide 2 (KLCP2)”, as that term is used herein, refers to a polypeptide comprising sufficient light chain (LC) sequence, such that when combined with a cognate heavy chain variable region, can mediate specific binding to its epitope and complex with an HCP2. In some embodiments, it comprises all or a fragment of a CH1 region. In some embodiments, a KLCP2 comprises LC-CDR1, LC-CDR2, LC-CDR3, FR1, FR2, FR3, FR4, and CH1, or sufficient sequence therefrom to mediate specific binding of its epitope and complex with an HCP2. KLCP2, together with its HCP2, provide specificity for a second epitope (while LLCP1, together with its HCP1, provide specificity for a first epitope).

[0841] “Heavy chain polypeptide 1 (HCP1)”, as that term is used herein, refers to a polypeptide comprising sufficient heavy chain (HC) sequence, e.g., HC variable region sequence, such that when combined with a cognate LLCP1, can mediate specific binding to its epitope and complex with an HCP1. In some embodiments, it comprises all or a fragment of a CH1 region. In some embodiments, it comprises all or a fragment of a CH2 and/or CH3 region. In some embodiments, an HCP1 comprises HC-CDR1, HC-CDR2, HC-CDR3, FR1, FR2, FR3, FR4, CH1, CH2, and CH3, or sufficient sequence therefrom to: (i) mediate specific binding of its epitope and complex with an LLCP1, (ii) to complex preferentially, as described herein to LLCP1 as opposed to KLCP2; and (iii) to complex preferentially, as described herein, to an HCP2, as opposed to another molecule of HCP1. HCP1, together with its LLCP1, provide specificity for a first epitope (while KLCP2, together with its HCP2, provide specificity for a second epitope).

[0842] “Heavy chain polypeptide 2 (HCP2)”, as that term is used herein, refers to a polypeptide comprising sufficient heavy chain (HC) sequence, e.g., HC variable region sequence, such that when combined with a cognate LLCP1, can mediate specific binding to its epitope and complex with an HCP1. In some embodiments, it comprises all or a fragment of a CH1 region. In some embodiments, it comprises all or a fragment of a CH2 and/or CH3 region. In some embodiments, an HCP1 comprises HC-CDR1, HC-CDR2, HC-CDR3, FR1, FR2, FR3, FR4, CH1, CH2, and CH3, or sufficient sequence therefrom to: (i) mediate specific binding of its epitope and complex with an KLCP2, (ii) to complex preferentially, as described herein to KLCP2 as opposed to LLCP1; and (iii) to complex preferentially, as described herein, to an HCP1, as opposed to another molecule of HCP2. HCP2, together with its KLCP2, provide specificity for a second epitope (while LLCP1, together with its HCP1, provide specificity for a first epitope).

[0843] In some embodiments, in the multifunctional polypeptide molecule as described herein: LLCP1 has a higher affinity for HCP1 than for HCP2; and/or KLCP2 has a higher affinity for HCP2 than for HCP1.

[0844] In some embodiments, the affinity of LLCP1 for HCP1 is sufficiently greater than its affinity for HCP2, such that under preselected conditions, e.g., in aqueous buffer, e.g., at pH 7, in saline, e.g., at pH 7, or under physiological conditions, at least 75, 80, 90, 95, 98, 99, 99.5, or 99.9% of the multispecific antibody molecule molecules have a LLCP1 complexed, or interfaced with, a HCP1.

[0845] In some embodiments, in the multifunctional polypeptide molecule as described herein: the HCP1 has a greater affinity for HCP2, than for a second molecule of HCP1; and/or the HCP2 has a greater affinity for HCP1, than for a second molecule of HCP2.

[0846] In some embodiments, the affinity of HCP1 for HCP2 is sufficiently greater than its affinity for a second molecule of HCP1, such that under preselected conditions, e.g., in aqueous buffer, e.g., at pH 7, in saline, e.g., at pH 7, or under physiological conditions, at least 75%, 80, 90, 95, 98, 99 99.5 or 99.9% of the multispecific antibody molecule molecules have a HCP1 complexed, or interfaced with, a HCP2.

[0847] In another aspect, described herein is a method for making, or producing, a multispecific antibody molecule. The method includes:
[0848] (i) providing a first heavy chain polypeptide (e.g., a heavy chain polypeptide comprising one, two, three or all of a first heavy chain variable region (first VH), a first CH1, a first heavy chain constant region (e.g., a first CH2, a first CH3, or both));
[0849] (ii) providing a second heavy chain polypeptide (e.g., a heavy chain polypeptide comprising one, two, three or all of a second heavy chain variable region (second VH), a second CH1, a second heavy chain constant region (e.g., a second CH2, a second CH3, or both));
[0850] (iii) providing a lambda chain polypeptide (e.g., a lambda light variable region (VLζ), a lambda light constant chain (VLζ), or both) that preferentially associates with the first heavy chain polypeptide (e.g., the first VH); and
[0851] (iv) providing a kappa chain polypeptide (e.g., a lambda light variable region (VLζ), a lambda light constant chain (VLζ), or both) that preferentially associates with the second heavy chain polypeptide (e.g., the second VH), under conditions where (i)-(iv) associate.

[0852] In some embodiments, the first and second heavy chain polypeptides form an Fe interface that enhances heterodimerization.

[0853] In some embodiments, (i)-(iv) (e.g., nucleic acid encoding (i)-(iv)) are introduced in a single cell, e.g., a single mammalian cell, e.g., a CHO cell. In some embodiments, (i)-(iv) are expressed in the cell. In some embodiments, (i)-(iv) (e.g., nucleic acid encoding (i)-(iv)) are introduced in different cells, e.g., different mammalian cells, e.g., two or more CHO cell. In some embodiments, (i)-(iv) are expressed in the cells.

[0854] In some embodiments, the method further comprises purifying a cell-expressed antibody molecule, e.g., using a lambda- and/or-kappa-specific purification, e.g., affinity chromatography.

[0855] In some embodiments, the method further comprises evaluating the cell-expressed multispecific antibody molecule. For example, the purified cell-expressed multispecific antibody molecule can be analyzed by techniques known in the art, include mass spectrometry. In some embodiments, the purified cell-expressed antibody molecule is cleaved, e.g., digested with papain to yield the Fab moieties and evaluated using mass spectrometry.

[0856] In some embodiments, the method produces correctly paired kappa/lambda multispecific, e.g., bispecific, antibody molecules in a high yield, e.g., at least 75%, 80, 90, 95, 98, 99 99.5 or 99.9%.

[0857] In other embodiments, the multispecific, e.g., a bispecific, antibody molecule that includes:
[0858] (i) a first heavy chain polypeptide (HCP1) (e.g., a heavy chain polypeptide comprising one, two, three or all of a first heavy chain variable region (first VH), a first CH1, a first heavy chain constant region (e.g., a first CH2, a first CH3, or both)), e.g., wherein the HCP1 binds to a first epitope;
[0859] (ii) a second heavy chain polypeptide (HCP2) (e.g., a heavy chain polypeptide comprising one, two, three or all of a second heavy chain variable region (second VH), a second CH1, a second heavy chain constant region (e.g., a second CH2, a second CH3, or both)), e.g., wherein the HCP2 binds to a second epitope;
[0860] (iii) a lambda light chain polypeptide (LLCP1) (e.g., a lambda light variable region (VLζ), a lambda light constant chain (VLζ), or both) that preferentially associates with the first heavy chain polypeptide (e.g., the first VH), e.g., wherein the LLCP1 binds to a first epitope; and
[0861] (iv) a kappa light chain polypeptide (KLCP2) (e.g., a kappa light variable region (VLκ), a kappa light constant chain (VLκ), or both) that preferentially associates with the second heavy chain polypeptide (e.g., the second VH), e.g., wherein the KLCP2 binds to a second epitope.

[0862] In some embodiments, the first and second heavy chain polypeptides form an Fe interface that enhances heterodimerization. In some embodiments, the multispecific antibody molecule has a first binding specificity that includes a hybrid VLζ-CLU heterodimerized to a first heavy chain variable region connected to the Fc constant, CH2-CH3 domain (having a knob modification) and a second binding specificity that includes a hybrid VLκ-CLκ heterodimerized to a second heavy chain variable region connected to the Fc constant, CH2-CH3 domain (having a hole modification).

### Multispecific or Multifunctional Antibody Molecules

[0863] Exemplary structures of multispecific and multifunctional molecules defined herein are described throughout. Exemplary structures are further described in: Weidle U et al. (2013) The Intriguing Options of Multispecific Antibody Formats for Treatment of Cancer. Cancer Genomics & Proteomics 10: 1-18 (2013); and Spiess C et al. (2015) Alternative molecular formats and therapeutic applications for bispecific antibodies. Molecular Immunology 67: 95-106; the full contents of each of which is incorporated by reference herein).

[0864] In some embodiments, multispecific antibody molecules can comprise more than one antigen-binding site, where different sites are specific for different antigens. In some embodiments, multispecific antibody molecules can bind more than one (e.g., two or more) epitopes on the same antigen. In some embodiments, multispecific antibody molecules comprise an antigen-binding site specific for a target cell (e.g., cancer cell) and a different antigen-binding site specific for an immune effector cell. In some embodiments, the multispecific antibody molecule is a bispecific antibody molecule. Bispecific antibody molecules can be classified into five different structural groups: (i) bispecific immunoglobulin G (BsIgG); (ii) IgG appended with an additional antigen-binding moiety; (iii) bispecific antibody fragments; (iv) bispecific fusion proteins; and (v) bispecific antibody conjugates.

[0865] BsIgG is a format that is monovalent for each antigen. Exemplary BsIgG formats include but are not limited to crossMab, DAF (two-in-one), DAF (four-in-one), DutaMab, DT-IgG, knobs-in-holes common LC, knobs-in-holes assembly, charge pair, Fab-arm exchange, SEEDbody, triomab, LUZ-Y, Fcab, Kk-body, orthogonal Fab. See Spiess et al. Mol. Immunol. 67(2015):95-106. Exemplary BsIgGs include catumaxomab (Fresenius Biotech, Trion Pharma, Neopharm), which contains an anti-CD3 arm and an anti-EpCAM arm; and ertumaxomab (Neovii Biotech, Fresenius Biotech), which targets CD3 and HER2. In some embodiments, BsIgG comprises heavy chains that are engineered for heterodimerization. For example, heavy chains can be engineered for heterodimerization using a “knobs-into-holes” strategy, a SEED platform, a common heavy chain (e.g., in Kk-bodies), and use of heterodimeric Fc regions. See Spiess et al. Mol. Immunol. 67(2015):95-106. Strategies that have been used to avoid heavy chain pairing of homodimers in BsIgG include knobs-in-holes, duobody, azymetric, charge pair, HA-TF, SEEDbody, and differential protein A affinity. See Id. BsIgG can be produced by separate expression of the component antibodies in different host cells and subsequent purification/assembly into a BsIgG. BsIgG can also be produced by expression of the component antibodies in a single host cell. BsIgG can be purified using affinity chromatography, e.g., using protein A and sequential pH elution.

[0866] IgG appended with an additional antigen-binding moiety is another format of bispecific antibody molecules. For example, monospecific IgG can be engineered to have bispecificity by appending an additional antigen-binding unit onto the monospecific IgG, e.g., at the N- or C-terminus of either the heavy or light chain. Exemplary additional antigen-binding units include single domain antibodies (e.g., variable heavy chain or variable light chain), engineered protein scaffolds, and paired antibody variable domains (e.g., single chain variable fragments or variable fragments). See Id. Examples of appended IgG formats include dual variable domain IgG (DVD-Ig), IgG(H)-scFv, scFv-(H)IgG, IgG(L)-scFv, scFv-(L)IgG, IgG(L,H)-Fv, IgG(H)-V, V(H)-IgG, IgG(L)-V, V(L)-IgG, KIH IgG-scFab, 2scFv-IgG, IgG-2scFv, scFv4-Ig, zybody, and DVI-IgG (four-in-one). See Spiess et al. Mol. Immunol. 67(2015):95-106. An example of an IgG-scFv is MM-141 (Merrimack Pharmaceuticals), which binds IGF-1R and HER3. Examples of DVD-Ig include ABT-981 (AbbVie), which binds IL-1α and IL-1β; and ABT-122 (AbbVie), which binds TNF and IL-17A.

[0867] Bispecific antibody fragments (BsAb) are a format of bispecific antibody molecules that lack some or all of the antibody constant domains. For example, some BsAb lack an Fc region. In some embodiments, bispecific antibody fragments include heavy and light chain regions that are connected by a peptide linker that permits efficient expression of the BsAb in a single host cell. Exemplary bispecific antibody fragments include but are not limited to nanobody, nanobody-HAS, BiTE, Diabody, DART, TandAb, scDiabody, scDiabody-CH3, Diabody-CH3, triple body, miniantibody, minibody, TriBi minibody, scFv-CH3 KIH, Fab-scFv, scFv-CH-CL-scFv, F(ab′)2, F(ab′)2-scFv2, scFv-KIH, Fab-scFv-Fc, tetravalent HCAb, scDiabody-Fe, Diabody-Fe, tandem scFv-Fc, and intrabody. See Id. For example, the BiTE format comprises tandem scFvs, where the component scFvs bind to CD3 on T cells and a surface antigen on cancer cells

[0868] Bispecific fusion proteins include antibody fragments linked to other proteins, e.g., to add additional specificity and/or functionality. An example of a bispecific fusion protein is an immTAC, which comprises an anti-CD3 scFv linked to an affinity-matured T-cell receptor that recognizes HLA-presented peptides. In some embodiments, the dock-and-lock (DNL) method can be used to generate bispecific antibody molecules with higher valency. Also, fusions to albumin binding proteins or human serum albumin can be extend the serum half-life of antibody fragments. See Id.

[0869] In some embodiments, chemical conjugation, e.g., chemical conjugation of antibodies and/or antibody fragments, can be used to create BsAb molecules. See Id. An exemplary bispecific antibody conjugate includes the CovX-body format, in which a low molecular weight drug is conjugated site-specifically to a single reactive lysine in each Fab arm or an antibody or fragment thereof. In some embodiments, the conjugation improves the serum half-life of the low molecular weight drug. An exemplary CovX-body is CVX-241 (NCT01004822), which comprises an antibody conjugated to two short peptides inhibiting either VEGF or Ang2. See Id.

[0870] The antibody molecules can be produced by recombinant expression, e.g., of at least one or more component, in a host system. Exemplary host systems include eukaryotic cells (e.g., mammalian cells, e.g., CHO cells, or insect cells, e.g., SF9 or S2 cells) and prokaryotic cells (e.g., E. coli). Bispecific antibody molecules can be produced by separate expression of the components in different host cells and subsequent purification/assembly. Alternatively, the antibody molecules can be produced by expression of the components in a single host cell. Purification of bispecific antibody molecules can be performed by various methods such as affinity chromatography, e.g., using protein A and sequential pH elution. In other embodiments, affinity tags can be used for purification, e.g., histidine-containing tag, myc tag, or streptavidin tag.

### Exemplary Bispecific Molecules

[0871] In an aspect, a multispecific molecule as described herein comprises a sequence as described herein, e.g., a sequence chosen from SEQ ID NOs: 1004-1007, 3275-3277, 3286, or 3287, or a sequence with at least 85%, 90%, 955, 96%, 97%, 98%, 99% or more identity thereto. In some embodiments, a multispecific molecule as described herein comprises a leader sequence comprising the amino acid sequence of SEQ ID NO: 3288. In some embodiments, a multispecific molecule as described herein does not comprise a leader sequence comprising the amino acid sequence of SEQ ID NO: 3288.

[0872] Molecule F: aCD19 x aVb6.5: Molecule F comprises a heavy chain comprising the amino acid sequence of SEQ ID NO: 1004 and a light chain comprising the amino acid sequence of SEQ ID NO: 1005.

Molecule F.1
(heavy chain) (Tcrvbeta6_5 scFv/anti-CD19 heavy chain)
SEQ ID NO: 1004
METDTLLLWVLLLWVPGSTGQVQLVQSGAEVKKPGSSVKVSCKASGYSFTTYYIHWVRQAPGQ
GLEWMGWFFPGSGNIKYNEKFKGRVTITADTSTSTAYMELSSLRSEDTAVYYCAGSYYSYDVLD
YWGQGTTVTVSSGGGGSGGGGSGGGGSGGGGSDIQMTQSPSFLSASVGDRVTITCKASQNVGIN
VVWHQQKPGKAPKALIYSSSHRYSGVPSRFSGSGSGTEFTLTISSLQPEDFATYFCQQFKSYPLTF
GQGTKLEIKGGGGSQVTLRESGPALVKPTQTLTLTCTFSGFSLSTSGMGVGWIRQPPGKALEWLA
HIWWDDDKRYNPALKSRLTISKDTSKNQVFLTMTNMDPVDTATYYCARMELWSYYFDYWGQ
GTTVTVSSASTKGPSVFPLAPSSKSTSGGTAALGCLVKDYFPEPVTVSWNSGALTSGVHTFPAVL
QSSGLYSLSSVVTVPSSSLGTQTYICNVNHKPSNTKVDKKVEPKSCDKTHTCPPCPAPELLGGPSV
FLFPPKPKDTLMISRTPEVTCVVVDVSHEDPEVKFNWYVDGVEVHNAKTKPREEQYASTYRVVS
VLTVLHQDWLNGKEYKCKVSNKALPAPIEKTISKAKGQPREPQVYTLPPSREEMTKNQVSLTCL
VKGFYPSDIAVEWESNGQPENNYKTTPPVLDSDGSFFLYSKLTVDKSRWQQGNVFSCSVMHEAL
HNHYTQKSLSLSPGK
Molecule F.2
(light chain) (anti-CD19 light chain)
SEQ ID NO: 1005
METPAQLLFLLLLWLPDTTGENVLTQSPATLSLSPGERATLSCSASSSVSYMHWYQQKPGQAPR
LLIYDTSKLASGIPARFSGSGSGTDHTLTISSLEPEDFAVYYCFQGSVYPFTFGQGTKLEIKRTVAA
PSVFIFPPSDEQLKSGTASVVCLLNNFYPREAKVQWKVDNALQSGNSQESVTEQDSKDSTYSLSS
TLTLSKADYEKHKVYACEVTHQGLSSPVTKSFNRGEC

[0873] In an aspect, a multispecific molecule as described herein comprises SEQ ID NO: 1004 and/or SEQ ID NO: 1005 or a sequence with at least 85%, 90%, 955, 96%, 97%, 98%, 99% or more identity thereto.

[0874] Molecule G: aBCMA x aVb6.5: Molecule G comprises a heavy chain comprising the amino acid sequence of SEQ ID NO: 1006 and a light chain comprising the amino acid sequence of SEQ ID NO: 1007.

Molecule G.1
(heavy chain)
SEQ ID NO: 1006
METDTLLLWVLLLWVPGSTGQVQLVQSGAEVKKPGSSVKVSCKASGYSFTTYYIHWVRQAPGQ
GLEWMGWFFPGSGNIKYNEKFKGRVTITADTSTSTAYMELSSLRSEDTAVYYCAGSYYSYDVLD
YWGQGTTVTVSSGGGGSGGGGSGGGGSGGGGSDIQMTQSPSFLSASVGDRVTITCKASQNVGIN
VVWHQQKPGKAPKALIYSSSHRYSGVPSRFSGSGSGTEFTLTISSLQPEDFATYFCQQFKSYPLTF
GQGTKLEIKGGGGSQVQLVESGGGVVQPGRSLRLSCAASGIDFSRYWMSWVRQAPGKGLEWV
GEINPDSSTINYAPSLKDRFTISRDNSKNTLYLQMSSLRAEDTAVYYCASLYYDYGDAMDYWGQ
GTTVTVSSASTKGPSVFPLAPSSKSTSGGTAALGCLVKDYFPEPVTVSWNSGALTSGVHTFPAVL
QSSGLYSLSSVVTVPSSSLGTQTYICNVNHKPSNTKVDKKVEPKSCDKTHTCPPCPAPELLGGPSV
FLFPPKPKDTLMISRTPEVTCVVVDVSHEDPEVKFNWYVDGVEVHNAKTKPREEQYASTYRVVS
VLTVLHQDWLNGKEYKCKVSNKALPAPIEKTISKAKGQPREPQVYTLPPSREEMTKNQVSLTCL
VKGFYPSDIAVEWESNGQPENNYKTTPPVLDSDGSFFLYSKLTVDKSRWQQGNVFSCSVMHEAL
HNRFTQKSLSLSPGK
Molecule G.2
(light chain)
SEQ ID NO: 1007
METDTLLLWVLLLWVPGSTGDIQMTQSPSSLSASVGDRVTITCKASQSVDSNVAWYQQKPEKAP
KALIFSASLRFSGVPSRFSGSGSGTDFTLTISSLQPEDFATYFCQQYNNYPLTFGQGTKLEIKRTVA
APSVFIFPPSDEQLKSGTASVVCLLNNFYPREAKVQWKVDNALQSGNSQESVTEQDSKDSTYSLS
STLTLSKADYEKHKVYACEVTHQGLSSPVTKSFNRGEC

[0875] In an aspect, a multispecific molecule as described herein comprises SEQ ID NO: 1006 and/or SEQ ID NO: 1007 or a sequence with at least 85%, 90%, 955, 96%, 97%, 98%, 99% or more identity thereto.

[0876] Molecule H: aBCMA x aTCRvbeta6_5: Molecule H comprises a first heavy chain comprising the amino acid sequence of SEQ ID NO: 3275, a light chain comprising the amino acid sequence of SEQ ID NO: 3277, and a second heavy chain comprising the amino acid sequence of SEQ ID NO: 3276.

Molecule H.1
(anti-BCMA heavy chain)
SEQ ID NO: 3275
METDTLLLWVLLLWVPGSTGQVQLVESGGGVVQPGRSLRLSCAASGIDFSRYWMSWVRQAPG
KGLEWVGEINPDSSTINYAPSLKDRFTISRDNSKNTLYLQMSSLRAEDTAVYYCASLYYDYGDA
MDYWGQGTTVTVSSASTKGPSVFPLAPSSKSTSGGTAALGCLVKDYFPEPVTVSWNSGALTSGV
HTFPAVLQSSGLYSLSSVVTVPSSSLGTQTYICNVNHKPSNTKVDKRVEPKSCDKTHTCPPCPAPE
LLGGPSVFLFPPKPKDTLMISRTPEVTCVVVDVSHEDPEVKFNWYVDGVEVHNAKTKPREEQYN
ATYRVVSVLTVLHQDWLNGKEYKCKVSNKALPAPIEKTISKAKGQPREPQVYTLPPCREEMTKN
QVSLWCLVKGFYPSDIAVEWESNGQPENNYKTTPPVLDSDGSFFLYSKLTVDKSRWQQGNVFSC
SVMHEALHNHYTQKSLSLSPGK
Molecule H.2
(TCRvbeta_6_5 scFv humanized)
SEQ ID NO: 3276
METDTLLLWVLLLWVPGSTGQVQLVQSGAEVKKPGSSVKVSCKASGYSFTTYYIHWVRQAPGQ
GLEWMGWFFPGSGNIKYNEKFKGRVTITADTSTSTAYMELSSLRSEDTAVYYCAGSYYSYDVLD
YWGQGTTVTVSSGGGGSGGGGSGGGGSGGGGSDIQMTQSPSFLSASVGDRVTITCKASQNVGIN
VVWHQQKPGKAPKALIYSSSHRYSGVPSRFSGSGSGTEFTLTISSLQPEDFATYFCQQFKSYPLTF
GQGTKLEIKGGGGSGGGGSDKTHTCPPCPAPELLGGPSVFLFPPKPKDTLMISRTPEVTCVVVDV
SHEDPEVKFNWYVDGVEVHNAKTKPREEQYASTYRVVSVLTVLHQDWLNGKEYKCKVSNKAL
PAPIEKTISKAKGQPREPQVCTLPPSREEMTKNQVSLSCAVKGFYPSDIAVEWESNGQPENNYKT
TPPVLDSDGSFFLVSKLTVDKSRWQQGNVFSCSVMHEALHNHYTQKSLSLSPGK
Molecule H.3
(anti-BCMA light chain)
SEQ ID NO: 3277
METDTLLLWVLLLWVPGSTGDIQMTQSPSSLSASVGDRVTITCKASQSVDSNVAWYQQKPEKAP
KALIFSASLRFSGVPSRFSGSGSGTDFTLTISSLQPEDFATYFCQQYNNYPLTFGQGTKLEIKRTVA
APSVFIFPPSDEQLKSGTASVVCLLNNFYPREAKVQWKVDNALQSGNSQESVTEQDSKDSTYSLS
STLTLSKADYEKHKVYACEVTHQGLSSPVTKSFNRGEC

[0877] In an aspect, a multispecific molecule as described herein comprises SEQ ID NO: 3275, SEQ ID NO: 3276, and/or SEQ ID NO: 3277 or a sequence with at least 85%, 90%, 955, 96%, 97%, 98%, 99% or more identity thereto.

[0878] Molecule I: half arm BCMA Fab with c-terminal scFv TCRvbeta: Molecule I comprises a first heavy chain comprising the amino acid sequence of SEQ ID NO: 3286, a light chain comprising the amino acid sequence of SEQ ID NO: 3277, and a second heavy chain comprising the amino acid sequence of SEQ ID NO: 3287.

Molecule I.1
(heavy chain 1)
SEQ ID NO: 3286
METDTLLLWVLLLWVPGSTGQVQLVESGGGVVQPGRSLRLSCAASGIDFSRYWMSWVRQAPG
KGLEWVGEINPDSSTINYAPSLKDRFTISRDNSKNTLYLQMSSLRAEDTAVYYCASLYYDYGDA
MDYWGQGTTVTVSSASTKGPSVFPLAPSSKSTSGGTAALGCLVKDYFPEPVTVSWNSGALTSGV
HTFPAVLQSSGLYSLSSVVTVPSSSLGTQTYICNVNHKPSNTKVDKRVEPKSCDKTHTCPPCPAPE
LLGGPSVFLFPPKPKDTLMISRTPEVTCVVVDVSHEDPEVKFNWYVDGVEVHNAKTKPREEQYN
STYRVVSVLTVLHQDWLNGKEYKCKVSNKALPAPIEKTISKAKGQPREPQVYTLPPCREEMTKN
QVSLWCLVKGFYPSDIAVEWESNGQPENNYKTTPPVLDSDGSFFLYSKLTVDKSRWQQGNVFSC
SVMHEALHNHYTQKSLSLSPGKGGGGSGGGGSGGGGSEVQLVESGGGLVQPGGSLRLSCAASG
FTFSTYAMNWVRQAPGKGLEWVSRIRSKYNNYATYYADSVKDRFTISRDDSKNTLYLQMNSLK
TEDTAVYYCVRHGNFGNSYVSWFAYWGQGTLVTVSSGGGGSGGGGSGGGGSGGGGSQAVVT
QEPSLTVSPGGTVTLTCRSSTGAVTTSNYANWVQQKPGQAPRGLIGGTNKRAPWTPARFSGSLL
GGKAALTLSGAQPEDEAEYYCALWYSNLWVFGGGTKLTVL
Molecule I.2
(light chain)
SEQ ID NO: 3277
METDTLLLWVLLLWVPGSTGDIQMTQSPSSLSASVGDRVTITCKASQSVDSNVAWYQQKPEKAP
KALIFSASLRFSGVPSRFSGSGSGTDFTLTISSLQPEDFATYFCQQYNNYPLTFGQGTKLEIKRTVA
APSVFIFPPSDEQLKSGTASVVCLLNNFYPREAKVQWKVDNALQSGNSQESVTEQDSKDSTYSLS
STLTLSKADYEKHKVYACEVTHQGLSSPVTKSFNRGEC
Molecule I.3
(heavy chain 2)
SEQ ID NO: 3287
METDTLLLWVLLLWVPGSTGDKTHTCPPCPAPELLGGPSVFLFPPKPKDTLMISRTPEVTCVVVD
VSHEDPEVKFNWYVDGVEVHNAKTKPREEQYNSTYRVVSVLTVLHQDWLNGKEYKCKVSNK
ALPAPIEKTISKAKGQPREPQVCTLPPSREEMTKNQVSLSCAVKGFYPSDIAVEWESNGQPENNY
KTTPPVLDSDGSFFLVSKLTVDKSRWQQGNVFSCSVMHEALHNHYTQKSLSLSPGK

[0879] In an aspect, a multispecific molecule as described herein comprises SEQ ID NO: 3286, SEQ ID NO: 3277, and/or SEQ ID NO: 3287 or a sequence with at least 85%, 90%, 955, 96%, 97%, 98%, 99% or more identity thereto.

[0880] In some embodiments, the multispecific or multifunctional molecule as described herein binds to immune cells. In some embodiments, the multispecific or multifunctional molecule as described herein binds to subsets of immune cells. In some embodiments, the multispecific or multifunctional molecule as described herein binds to T cells. In some embodiments, the multispecific or multifunctional molecule as described herein binds to gamma/delta T cells. In some embodiments, the multispecific or multifunctional molecule as described herein binds to NKT cells. In some embodiments, the multispecific or multifunctional molecule as described herein binds to T cells via a binding moiety. Exemplary binding moieties include, but are not limited to, the binding moieties that bind to TRBC1, TRBC2, CD3, TRAC, TRAV subtypes, CD4, CD8, CD2, CD28, 41BB, PD1, CTLA4, OX40, TIM3, or LAG3. In some embodiments, the multispecific or multifunctional molecule as described herein binds to T cells via a binding moiety that binds to TRBC1. In some embodiments, the multispecific or multifunctional molecule as described herein binds to T cells via a binding moiety that binds to TRBC2. In some embodiments, the multispecific or multifunctional molecule as described herein comprises a binding moiety that binds to TRBC1. In some embodiments, the multispecific or multifunctional molecule as described herein comprises a binding moiety that binds to TRBC2.

### Linkers

[0881] The multispecific or multifunctional molecule as described herein can further include a linker, e.g., a linker between one or more of: the antigen binding domain and the cytokine molecule, the antigen binding domain and the immune cell engager, the antigen binding domain and the stromal modifying moiety, the cytokine molecule and the immune cell engager, the cytokine molecule and the stromal modifying moiety, the immune cell engager and the stromal modifying moiety, the antigen binding domain and the immunoglobulin chain constant region, the cytokine molecule and the immunoglobulin chain constant region, the immune cell engager and the immunoglobulin chain constant region, or the stromal modifying moiety and the immunoglobulin chain constant region. In some embodiments, the linker is chosen from: a cleavable linker, a non-cleavable linker, a peptide linker, a flexible linker, a rigid linker, a helical linker, or a non-helical linker, or a combination thereof.

[0882] In some embodiments, the multispecific molecule can include one, two, three or four linkers, e.g., a peptide linker. In some embodiments, the peptide linker includes Gly and Ser. In some embodiments, the peptide linker is selected from GGGGS (SEQ ID NO: 3307); GGGGSGGGGS (SEQ ID NO: 3308); GGGGSGGGGSGGGGS (SEQ ID NO: 3309); DVPSGPGGGGGSGGGGS (SEQ ID NO: 3310); and GGGGSGGGGSGGGGGS (SEQ ID NO: 3643). In some embodiments, the peptide linker is a A(EAAAK)nA (SEQ ID NO: 3437) family of linkers (e.g., as described in Protein Eng. (2001) 14 (8): 529-532). These are stiff helical linkers with n ranging from 2-5. In some embodiments, the peptide linker is selected from AEAAAKEAAAKAAA (SEQ ID NO: 3314); AEAAAKEAAAKEAAAKAAA (SEQ ID NO: 3315); AEAAAKEAAAKEAAAKEAAAKAAA (SEQ ID NO: 3316); and AEAAAKEAAAKEAAAKEAAAKEAAAKAAA (SEQ ID NO: 3317).

### Nucleic Acids

[0883] Described herein, in certain embodiments, is an isolated nucleic acid molecule comprising a nucleotide sequence having at least 75%, 80%, 85%, 90%, 95%, 99%, 99.5%, 99.9%, or 100% sequence identity to the nucleotide sequence encoding the multifunctional polypeptide molecule as described herein.

[0884] Nucleic acids encoding the aforementioned antibody molecules, e.g., anti-TCRβV antibody molecules, multispecific or multifunctional molecules are also disclosed.

[0885] In certain embodiments, the invention features nucleic acids comprising nucleotide sequences that encode heavy and light chain variable regions and CDRs or hypervariable loops of the antibody molecules, as described herein. For example, the invention features a first and second nucleic acid encoding heavy and light chain variable regions, respectively, of an antibody molecule chosen from one or more of the antibody molecules as described herein. The nucleic acid can comprise a nucleotide sequence as set forth in the tables herein, or a sequence substantially identical thereto (e.g., a sequence at least about 85%, 90%, 95%, 99% or more identical thereto, or which differs by no more than 3, 6, 15, 30, or 45 nucleotides from the sequences shown in the tables herein.

[0886] In certain embodiments, the nucleic acid can comprise a nucleotide sequence encoding at least one, two, or three CDRs or hypervariable loops from a heavy chain variable region having an amino acid sequence as set forth in the tables herein, or a sequence substantially homologous thereto (e.g., a sequence at least about 85%, 90%, 95%, 99% or more identical thereto, and/or having one or more substitutions, e.g., conserved substitutions). In other embodiments, the nucleic acid can comprise a nucleotide sequence encoding at least one, two, or three CDRs or hypervariable loops from a light chain variable region having an amino acid sequence as set forth in the tables herein, or a sequence substantially homologous thereto (e.g., a sequence at least about 85%, 90%, 95%, 99% or more identical thereto, and/or having one or more substitutions, e.g., conserved substitutions). In yet another embodiment, the nucleic acid can comprise a nucleotide sequence encoding at least one, two, three, four, five, or six CDRs or hypervariable loops from heavy and light chain variable regions having an amino acid sequence as set forth in the tables herein, or a sequence substantially homologous thereto (e.g., a sequence at least about 85%, 90%, 95%, 99% or more identical thereto, and/or having one or more substitutions, e.g., conserved substitutions).

[0887] In certain embodiments, the nucleic acid can comprise a nucleotide sequence encoding at least one, two, or three CDRs or hypervariable loops from a heavy chain variable region having the nucleotide sequence as set forth in the tables herein, a sequence substantially homologous thereto (e.g., a sequence at least about 85%, 90%, 95%, 99% or more identical thereto, and/or capable of hybridizing under the stringency conditions described herein). In another embodiment, the nucleic acid can comprise a nucleotide sequence encoding at least one, two, or three CDRs or hypervariable loops from a light chain variable region having the nucleotide sequence as set forth in the tables herein, or a sequence substantially homologous thereto (e.g., a sequence at least about 85%, 90%, 95%, 99% or more identical thereto, and/or capable of hybridizing under the stringency conditions described herein). In yet another embodiment, the nucleic acid can comprise a nucleotide sequence encoding at least one, two, three, four, five, or six CDRs or hypervariable loops from heavy and light chain variable regions having the nucleotide sequence as set forth in the tables herein, or a sequence substantially homologous thereto (e.g., a sequence at least about 85%, 90%, 95%, 99% or more identical thereto, and/or capable of hybridizing under the stringency conditions described herein).

[0888] In certain embodiments, the nucleic acid can comprise a nucleotide sequence encoding a cytokine molecule, an immune cell engager, or a stromal modifying moiety as described herein.

[0889] In another aspect, the application features host cells and vectors containing the nucleic acids described herein. The nucleic acids may be present in a single vector or separate vectors present in the same host cell or separate host cell, as described in more detail hereinbelow.

### Vectors

[0890] Described herein, in certain embodiments, is a vector comprising one or more of the nucleic acid molecules as described herein.

[0891] Further provided herein are vectors comprising the nucleotide sequences encoding antibody molecules, e.g., anti-TCRβV antibody molecules, or a multispecific or multifunctional molecule described herein. In some embodiments, the vectors comprise nucleic acid sequences encoding antibody molecules, e.g., anti-TCRβV antibody molecules, or multispecific or multifunctional molecule described herein. In some embodiments, the vectors comprise the nucleotide sequences described herein. The vectors include, but are not limited to, a virus, plasmid, cosmid, lambda phage or a yeast artificial chromosome (YAC).

[0892] Numerous vector systems can be employed. For example, one class of vectors utilizes DNA elements which are derived from animal viruses such as, for example, bovine papilloma virus, polyoma virus, adenovirus, vaccinia virus, baculovirus, retroviruses (Rous Sarcoma Virus, MMTV or MOMLV) or SV40 virus. Another class of vectors utilizes RNA elements derived from RNA viruses such as Semliki Forest virus, Eastern Equine Encephalitis virus and Flaviviruses.

[0893] Additionally, cells which have stably integrated the DNA into their chromosomes may be selected by introducing one or more markers which allow for the selection of transfected host cells. The marker may provide, for example, prototropy to an auxotrophic host, biocide resistance (e.g., antibiotics), or resistance to heavy metals such as copper, or the like. The selectable marker gene can be either directly linked to the DNA sequences to be expressed, or introduced into the same cell by cotransformation. Additional elements may also be needed for optimal synthesis of mRNA. These elements may include splice signals, as well as transcriptional promoters, enhancers, and termination signals.

[0894] Once the expression vector or DNA sequence containing the constructs has been prepared for expression, the expression vectors may be transfected or introduced into an appropriate host cell. Various techniques may be employed to achieve this, such as, for example, protoplast fusion, calcium phosphate precipitation, electroporation, retroviral transduction, viral transfection, gene gun, lipid based transfection or other conventional techniques. In the case of protoplast fusion, the cells are grown in media and screened for the appropriate activity.

[0895] Methods and conditions for culturing the resulting transfected cells and for recovering the antibody molecule produced are known to those skilled in the art, and may be varied or optimized depending upon the specific expression vector and mammalian host cell employed, based upon the present description.

### Cells

[0896] Described herein, in certain embodiments, is a cell comprising the nucleic acid as described herein or the vector as described herein.

[0897] In another aspect, described herein are host cells and vectors containing the nucleic acids. The nucleic acids may be present in a single vector or separate vectors present in the same host cell or separate host cell. The host cell can be a eukaryotic cell, e.g., a mammalian cell, an insect cell, a yeast cell, or a prokaryotic cell, e.g., E. coli. For example, the mammalian cell can be a cultured cell or a cell line. Exemplary mammalian cells include lymphocytic cell lines (e.g., NSO), Chinese hamster ovary cells (CHO), COS cells, oocyte cells, and cells from a transgenic animal, e.g., mammary epithelial cell.

[0898] In some embodiments, described herein are host cells comprising a nucleic acid encoding an antibody molecule as described herein.

[0899] In some embodiments, described herein are the host cells genetically engineered to comprise nucleic acids encoding the antibody molecule.

[0900] In some embodiments, the host cells are genetically engineered by using an expression cassette. The phrase “expression cassette,” refers to nucleotide sequences, which are capable of affecting expression of a gene in hosts compatible with such sequences. Such cassettes may include a promoter, an open reading frame with or without introns, and a termination signal. Additional factors necessary or helpful in effecting expression may also be used, such as, for example, an inducible promoter.

[0901] In some embodiments, described herein are host cells comprising the vectors described herein. The cell can be, but is not limited to, a eukaryotic cell, a bacterial cell, an insect cell, or a human cell. Suitable eukaryotic cells include, but are not limited to, Vero cells, HeLa cells, COS cells, CHO cells, HEK293 cells, BHK cells and MDCKII cells. Suitable insect cells include, but are not limited to, Sf9 cells.

Method of Expanding Cells with Anti-TCRVB Antibodies

[0902] Any of the compositions and methods described herein can be used to expand an immune cell population. An immune cell provided herein includes an immune cell derived from a hematopoietic stem cell or an immune cell derived from a non-hematopoietic stem cell, e.g., by differentiation or de-differentiation.

[0903] An immune cell includes a hematopoietic stem cell, progeny thereof and/or cells that have differentiated from said HSC, e.g., lymphoid cells or myeloid cells. An immune cell can be an adaptive immune cell or an innate immune cell. Examples of immune cells include T cells, B cells, Natural Killer cells, Natural Killer T cells, neutrophils, dendritic cells, monocytes, macrophages, and granulocytes.

[0904] In some embodiments, an immune cell is a T cell. In some embodiments, a T cell includes a CD4+ T cell, a CD8+ T cell, a TCR alpha-beta T cell, a TCR gamma-delta T cell. In some embodiments, a T cell comprises a memory T cell (e.g., a central memory T cell, or an effector memory T cell (e.g., a TEMRA) or an effector T cell. In some embodiments, a T cell comprises a tumor infiltrating lymphocyte (TIL).

[0905] In some embodiments, an immune cell is an NK cell.

[0906] In some embodiments, an immune cell is a TIL. TILs are immune cells (e.g., T cells, B cells or NK cells) that can be found in a tumor or around a tumor (e.g., in the stroma or tumor microenvironment of a tumor), e.g., a solid tumor, e.g., as described herein. TILs can be obtained from a sample from a subject having cancer, e.g., a biopsy or a surgical sample. In some embodiments, TILs can be expanded using a method as described herein. In some embodiments, a population of expanded TILs, e.g., expanded using a method as described herein, can be administered to a subject to treat a disease, e.g., a cancer.

[0907] In some embodiments, immune cells, e.g., T cells (e.g., TILs), can be obtained from a unit of blood collected from a subject using any number of techniques known to the skilled artisan, such as Ficoll™ separation. In one aspect, cells from the circulating blood of an individual are obtained by apheresis. The apheresis product typically contains lymphocytes, including T cells, monocytes, granulocytes, B cells, other nucleated white blood cells, red blood cells, and platelets. In one aspect, the cells collected by apheresis may be washed to remove the plasma fraction and, optionally, to place the cells in an appropriate buffer or media for subsequent processing steps. In some embodiments, the cells are washed with phosphate buffered saline (PBS). In an alternative embodiment, the wash solution lacks calcium and may lack magnesium or may lack many if not all divalent cations. The methods described herein can include more than one selection step, e.g., more than one depletion step.

[0908] In some embodiments, the methods of the application can utilize culture media conditions comprising DMEM, DMEM F12, RPMI 1640, and/or AIM V media. The media can be supplemented with glutamine, HEPES buffer (e.g., 10 mM), serum (e.g., heat-inactivated serum, e.g., 10%), and/or beta mercaptoethanol (e.g., 55 uM). IN some embodiments, the culture conditions as described herein comprise one or more supplements, cytokines, growth factors, or hormones. In some embodiments, the culture condition comprises one or more of IL-2, IL-15, or IL-7, or a combination thereof.

[0909] Immune effector cells such as T cells may be activated and expanded generally using methods as described, for example, in U.S. Pat. Nos. 6,352,694; 6,534,055; or 6,905,680. Generally, a population of immune cells, may be expanded by contact with an agent that stimulates a CD3/TCR complex associated signal and a ligand that stimulates a costimulatory molecule on the surface of the T cells; and/or by contact with a cytokine, e.g., IL-2, IL-15 or IL-7. T cell expansion protocols can also include stimulation, such as by contact with an anti-CD3 antibody, or antigen-binding fragment thereof, or an anti-CD2 antibody immobilized on a surface, or by contact with a protein kinase C activator (e.g., bryostatin) in conjunction with a calcium ionophore. For example, a population of T cells can be contacted with an anti-CD3 antibody and an anti-CD28 antibody, under conditions appropriate for stimulating proliferation of the T cells. To stimulate proliferation of either CD4+ T cells or CD8+ T cells, an anti-CD3 antibody and an anti-CD28 antibody can be used. Examples of an anti-CD28 antibody include 9.3, B-T3, XR-CD28 (Diaclone, Besangon, France) can be used as can other methods commonly known in the art (Berg et al., Transplant Proc. 30(8):3975-3977, 1998; Haanen et al., J. Exp. Med. 190(9):13191328, 1999; Garland et al., J. Immunol Meth. 227(1-2):53-63, 1999).

[0910] A TIL population can also be expanded by methods known in the art. For example, a population of TILs can be expanded as described in Hall et al., Journal for Immuno Therapy of Cancer (2016) 4:61, the entire contents of which are hereby incorporated by reference. Briefly, TILs can be isolated from a sample by mechanical and/or physical digestion. The resultant TIL population can be stimulated with an anti-CD3 antibody in the presence of non-dividing feeder cells. In some embodiments, the TIL population can be cultured, e.g., expanded, in the presence of IL-2, e.g., human IL-2. In some embodiments, the TIL cells can be cultured, e.g., expanded for a period of at least 1-21 days, e.g., at least 1, 2, 3, 4, 5, 6, 7, 8, 9, 10, 11, 12, 13, 14, 15, 16, 17, 18, 19, 20 or 21 days.

[0911] As described herein, in some embodiments, an immune cell population (e.g., a T cell (e.g., a T_{EMRA} cell or a TIL population) can be expanded by contacting the immune cell population with an anti-TCRVB antibody, e.g., as described herein.

[0912] In some embodiments, the expansion occurs in vivo, e.g., in a subject. In some embodiments, a subject is administered the multispecific or multifunctional molecules comprising TCRβV-binding moieties as described herein resulting in expansion of immune cells in vivo.

[0913] In some embodiments, the expansion occurs ex vivo, e.g., in vitro. In some embodiments, cells from a subject, e.g., T cells, e.g., TIL cells, are expanded in vitro with the multispecific or multifunctional molecules as described herein. In some embodiments, the expanded TILs are administered to the subject to treat a disease or a symptom of a disease.

[0914] In some embodiments, a method of expansion as described herein results in an expansion of at least 1.1-10 fold, 10-20 fold, or 20-50 fold expansion. In some embodiments, the expansion is at least 1.1, 1.2, 1.3, 1.4, 1.5, 2, 3, 4, 5, 6, 7, 8, 9, 10, 15, 20, 25, 30, 35, 40, 45 or 50 fold expansion.

[0915] In some embodiments, a method of expansion as described herein comprises culturing, e.g., expanding, the cells for at least about 4 hours, 6 hours, 10 hours, 12 hours, 15 hours, 18 hours, 20 hours, or 22 hours. In some embodiments, a method of expansion as described herein comprises culturing, e.g., expanding, the cells for at least 1, 2, 3, 4, 5, 6, 7, 8, 9, 10, 11, 12, 13, 14, 15, 1, 6 17, 18, 19, 20 or 21 days. In some embodiments, a method of expansion as described herein comprises culturing, e.g., expanding, the cells for at least about 1 week, 2 weeks, 3 weeks, 4 weeks, 5 weeks, 6 weeks, 7 weeks or 8 weeks.

[0916] In some embodiments, a method of expansion as described herein is performed on immune cells obtained from a healthy subject.

[0917] In some embodiments, a method of expansion as described herein is performed on immune cells (e.g., TILs) obtained from a subject having a disease, e.g., a cancer, e.g., a solid tumor as described herein.

[0918] In some embodiments, a method of expansion as described herein further comprises contacting the population of cells with an agent, that promotes, e.g., increases, immune cell expansion. In some embodiments, the agent comprises an immune checkpoint inhibitor, e.g., a PD-1 inhibitor, a LAG-3 inhibitor, a CTLA4 inhibitor, or a TIM-3 inhibitor. In some embodiments, the agent comprises a 4-1BB agonist, e.g., an anti-4-1BB antibody.

[0919] Without wishing to be bound by theory, in some embodiments, the multispecific or multifunctional molecules as described herein can expand, e.g., selectively or preferentially expand, T cells expressing a T cell receptor (TCR) comprising a TCR alpha and/or TCR beta molecule, e.g., TCR alpha-beta T cells (αβ T cells). In some embodiments, the multispecific or multifunctional molecules as described herein do not expand, or induce proliferation of T cells expressing a TCR comprising a TCR gamma and/or TCR delta molecule, e.g., TCR gamma-delta T cells (γδ T cells). In some embodiments, the multispecific or multifunctional molecules as described herein selectively or preferentially expand αβ T cells over γδ T cells.

[0920] Without wishing to be bound by theory, it is believed that, in some embodiments, γδ T cells are associated with cytokine release syndrome (CRS) and/or neurotoxicity (NT). In some embodiments, the multispecific or multifunctional molecules as described herein result in selective expansion of non-γδ T cells, e.g., expansion of αβ T cells, thus reducing CRS and/or NT.

[0921] In some embodiments, any of the compositions or methods as described herein result in an immune cell population having a reduction of, e.g., depletion of, γδ T cells. In some embodiments, the immune cell population is contacted with an agent that reduces, e.g., inhibits or depletes, γδ T cells, e.g., an anti-IL-17 antibody or an agent that binds to a TCR gamma and/or TCR delta molecule.

### CRS Grading

[0922] In some embodiments, CRS (Cytokine Release Syndrome) can be graded in severity from 1-5 as follows. Grades 1-3 are less than severe CRS. Grades 4-5 are severe CRS. For Grade 1 CRS, only symptomatic treatment is needed (e.g., nausea, fever, fatigue, myalgias, malaise, headache) and symptoms are not life threatening. For Grade 2 CRS, the symptoms require moderate intervention and generally respond to moderate intervention. Subjects having Grade 2 CRS develop hypotension that is responsive to either fluids or one low-dose vasopressor; or they develop grade 2 organ toxicity or mild respiratory symptoms that are responsive to low flow oxygen (<40% oxygen). In Grade 3 CRS subjects, hypotension generally cannot be reversed by fluid therapy or one low-dose vasopressor. These subjects generally require more than low flow oxygen and have grade 3 organ toxicity (e.g., renal or cardiac dysfunction or coagulopathy) and/or grade 4 transaminitis. Grade 3 CRS subjects require more aggressive intervention, e.g., oxygen of 40% or higher, high dose vasopressor(s), and/or multiple vasopressors. Grade 4 CRS subjects suffer from immediately life-threatening symptoms, including grade 4 organ toxicity or a need for mechanical ventilation. Grade 4 CRS subjects generally do not have transaminitis. In Grade 5 CRS subjects, the toxicity causes death. Sets of criteria for grading CRS are provided herein as Table 5, Table 6, and Table 7. Unless otherwise specified, CRS as used herein refers to CRS according to the criteria of Table 6.

[0923] In some embodiments, CRS is graded according to Table 5.

[0924] The term “cytokine profile” as used herein, refers to the level and/or activity of on one or more cytokines or chemokines, e.g., as described herein. In some embodiments, a cytokine profile comprises the level and/or activity of a naturally occurring cytokine, a fragment or a functional fragment or a functional variant thereof. In some embodiments, a cytokine profile comprises the level and/or activity of one or more cytokines and/or one or more chemokines (e.g., as described herein). In some embodiments, a cytokine profile comprises the level and/or activity of a naturally occurring cytokine, a fragment or a functional fragment or a functional variant thereof. In some embodiments, a cytokine profile comprises the level and/or activity of a naturally occurring chemokine, a fragment or a functional fragment or a functional variant thereof. In some embodiments, a cytokine profile comprises the level and/or activity of one or more of: IL-2 (e.g., full length, a variant, or a fragment thereof); IL-1beta (e.g., full length, a variant, or a fragment thereof); IL-6 (e.g., full length, a variant, or a fragment thereof); TNFα (e.g., full length, a variant, or a fragment thereof); IFNgamma (e.g., full length, a variant, or a fragment thereof) IL-10 (e.g., full length, a variant, or a fragment thereof); IL-4 (e.g., full length, a variant, or a fragment thereof); TNF alpha (e.g., full length, a variant, or a fragment thereof); IL-12p70 (e.g., full length, a variant, or a fragment thereof); IL-13 (e.g., full length, a variant, or a fragment thereof); IL-8 (e.g., full length, a variant, or a fragment thereof); Eotaxin (e.g., full length, a variant, or a fragment thereof); Eotaxin-3 (e.g., full length, a variant, or a fragment thereof); IL-8 (HA) (e.g., full length, a variant, or a fragment thereof); IP-10 (e.g., full length, a variant, or a fragment thereof); MCP-1 (e.g., full length, a variant, or a fragment thereof); MCP-4 (e.g., full length, a variant, or a fragment thereof); MDC (e.g., full length, a variant, or a fragment thereof); MIP-1a (e.g., full length, a variant, or a fragment thereof); MIP-1b (e.g., full length, a variant, or a fragment thereof); TARC (e.g., full length, a variant, or a fragment thereof); GM-CSF (e.g., full length, a variant, or a fragment thereof); IL-12 23p40 (e.g., full length, a variant, or a fragment thereof); IL-15 (e.g., full length, a variant, or a fragment thereof); IL-16 (e.g., full length, a variant, or a fragment thereof); IL-17a (e.g., full length, a variant, or a fragment thereof); IL-1a (e.g., full length, a variant, or a fragment thereof); IL-5 (e.g., full length, a variant, or a fragment thereof); IL-7 (e.g., full length, a variant, or a fragment thereof); TNF-beta (e.g., full length, a variant, or a fragment thereof); or VEGF (e.g., full length, a variant, or a fragment thereof). In some embodiments, a cytokine profile includes secretion of one or more cytokines or chemokines. In some embodiments, a cytokine in a cytokine profile can be modulated, e.g., increased or decreased, by an anti-TCRBV antibody molecule described herein. In some embodiments, the cytokine profile includes cytokines associated with a cytokine storm or cytokine release syndrome (CRS), e.g., IL-6, IL-1beta, TNFalpha and IL-10.

### Pharmaceutical Compositions

[0925] Described herein, in certain embodiments, is a pharmaceutical composition comprising the multifunctional polypeptide molecule as described herein, the nucleic acid molecules as described herein, the vector as described herein, or the cell as described herein, and a pharmaceutically acceptable carrier, excipient, or diluent.

[0926] Pharmaceutical compositions or formulations comprising the agent, e.g., the multifunctional or multispecific molecules, of the described compositions and for use in any of the described methods can be prepared according to conventional techniques well known in the pharmaceutical industry and described in the published literature. In some embodiments, a pharmaceutical composition or formulation for treating a subject comprises an effective amount of any the multifunctional or multispecific molecules or the compositions as described herein, or a pharmaceutically acceptable salt, solvate, hydrate or ester thereof. The pharmaceutical formulation comprising the multifunctional or multispecific molecules as described herein may further comprise a pharmaceutically acceptable excipient, diluent or carrier.

[0927] Pharmaceutically acceptable salts are suitable for use in contact with the tissues of humans and lower animals without undue toxicity, irritation, allergic response, etc., and are commensurate with a reasonable benefit/risk ratio. (See, e.g., S. M. Berge, et al., J. Pharmaceutical Sciences, 66: 1-19 (1977), incorporated herein by reference for this purpose. The salts can be prepared in situ during the final isolation and purification of the compounds, or separately by reacting the free base form with a suitable organic acid. Examples of pharmaceutically acceptable, nontoxic acid addition salts are salts of an amino group formed with inorganic acids such as hydrochloric acid, hydrobromic acid, phosphoric acid, sulfuric acid and perchloric acid or with organic acids such as acetic acid, oxalic acid, maleic acid, tartaric acid, citric acid, succinic acid or malonic acid or by using other documented methodologies such as ion exchange. Other pharmaceutically acceptable salts include adipate, alginate, ascorbate, aspartate, benzenesulfonate, benzoate, bisulfate, borate, butyrate, camphorate, camphorsulfonate, citrate, cyclopentanepropionate, digluconate, dodecylsulfate, ethanesulfonate, formate, fumarate, glucoheptonate, glycerophosphate, gluconate, hemisulfate, heptanoate, hexanoate, hydroiodide, 2-hydroxy-ethanesulfonate, lactobionate, lactate, laurate, lauryl sulfate, malate, maleate, malonate, methanesulfonate, 2-naphthalenesulfonate, nicotinate, nitrate, oleate, oxalate, palmitate, pamoate, pectinate, persulfate, 3-phenylpropionate, phosphate, picrate, pivalate, propionate, stearate, succinate, sulfate, tartrate, thiocyanate, p-toluenesulfonate, undecanoate, valerate salts, and the like. Representative alkali or alkaline earth metal salts include sodium, lithium, potassium, calcium, magnesium, and the like. Further pharmaceutically acceptable salts include, when appropriate, nontoxic ammonium, quaternary ammonium, and amine cations formed using counterions such as halide, hydroxide, carboxylate, sulfate, phosphate, nitrate, loweralkyl sulfonate and aryl sulfonate.

[0928] In some embodiments, the compositions are formulated into any of many possible dosage forms such as, but not limited to, tablets, capsules, gel capsules, liquid syrups, soft gels, suppositories, and enemas. In some embodiments, the compositions are formulated as suspensions in aqueous, non-aqueous or mixed media. Aqueous suspensions may further contain substances that increase the viscosity of the suspension including, for example, sodium carboxymethylcellulose, sorbitol and/or dextran. The suspension may also contain stabilizers. In some embodiments, a pharmaceutical formulation or composition as described herein includes, but is not limited to, a solution, emulsion, microemulsion, foam or liposome-containing formulation (e.g., cationic or noncationic liposomes).

[0929] The pharmaceutical composition or formulation described herein may comprise one or more penetration enhancers, carriers, excipients or other active or inactive ingredients as appropriate and well known to those of skill in the art or described in the published literature. In some embodiments, liposomes also include sterically stabilized liposomes, e.g., liposomes comprising one or more specialized lipids. These specialized lipids result in liposomes with enhanced circulation lifetimes. In some embodiments, a sterically stabilized liposome comprises one or more glycolipids or is derivatized with one or more hydrophilic polymers, such as a polyethylene glycol (PEG) moiety. In some embodiments, a surfactant is included in the pharmaceutical formulation or compositions. The use of surfactants in drug products, formulations and emulsions is well known in the art. In some embodiments, the present disclosure employs a penetration enhancer to effect the efficient delivery of the multifunctional or multispecific molecules or the compositions as described herein, e.g., to aid diffusion across cell membranes and/or enhance the permeability of a lipophilic drug. In some embodiments, the penetration enhancers are a surfactant, fatty acid, bile salt, chelating agent, or non-chelating nonsurfactant.

[0930] In some embodiments, the pharmaceutical formulation comprises multiple multifunctional or multispecific molecules as described herein. In some embodiments, the multifunctional or multispecific molecules or the compositions as described herein is administered in combination with another drug or therapeutic agent.

### Treatment of Subjects

[0931] Any of the compositions provided herein may be administered to an individual. “Individual” may be used interchangeably with “subject” or “patient.” An individual may be a mammal, for example a human or animal such as a non-human primate, a rodent, a rabbit, a rat, a mouse, a horse, a donkey, a goat, a cat, a dog, a cow, a pig, or a sheep. In some embodiments, the individual is a human. In some embodiments, the individual is a fetus, an embryo, or a child. In other embodiments, the individual may be another eukaryotic organism, such as a plant. In some embodiments, the compositions provided herein are administered to a cell ex vivo.

[0932] In some embodiments, the compositions provided herein are administered to an individual as a method of treating a disease or disorder. In some embodiments, the individual has a genetic disease, such as any of the diseases described herein. In some embodiments, the individual is at risk of having a disease, such as any of the diseases described herein. In some embodiments, the individual is at increased risk of having a disease or disorder caused by insufficient amount of a protein or insufficient activity of a protein. If an individual is “at an increased risk” of having a disease or disorder caused insufficient amount of a protein or insufficient activity of a protein, the method involves preventative or prophylactic treatment. For example, an individual may be at an increased risk of having such a disease or disorder because of family history of the disease. Typically, individuals at an increased risk of having such a disease or disorder benefit from prophylactic treatment (e.g., by preventing or delaying the onset or progression of the disease or disorder). In some embodiments, a fetus is treated in utero, e.g., by administering the multifunctional or multispecific molecules or the compositions as described herein to the fetus directly or indirectly (e.g., via the mother).

[0933] Suitable routes for administration of the multifunctional or multispecific molecules or the compositions as described herein may vary depending on cell type to which delivery of the multifunctional or multispecific molecules or the compositions is desired. The multifunctional or multispecific molecules or the compositions as described herein may be administered to patients parenterally, for example, by intrathecal injection, intracerebroventricular injection, intraperitoneal injection, intramuscular injection, subcutaneous injection, or intravenous injection.

[0934] In some embodiments, the multifunctional or multispecific molecules or the compositions as described herein are administered with one or more agents capable of promoting penetration of the subject the multifunctional or multispecific molecules or the compositions as described herein across the blood-brain barrier by any method known in the art. For example, delivery of agents by administration of an adenovirus vector to motor neurons in muscle tissue is described in U.S. Pat. No. 6,632,427, “Adenoviral-vector-mediated gene transfer into medullary motor neurons,” incorporated herein by reference. Delivery of vectors directly to the brain, e.g., the striatum, the thalamus, the hippocampus, or the substantia nigra, is described, e.g., in U.S. Pat. No. 6,756,523, “Adenovirus vectors for the transfer of foreign genes into cells of the central nervous system particularly in brain,” incorporated herein by reference.

[0935] In some embodiments, the multifunctional or multispecific molecules or the compositions as described herein are linked or conjugated with agents that provide desirable pharmaceutical or pharmacodynamic properties. In some embodiments, the multifunctional or multispecific molecules or the compositions as described herein are coupled to a substance, known in the art to promote penetration or transport across the blood-brain barrier, e.g., an antibody to the transferrin receptor. In some embodiments, the multifunctional or multispecific molecules or the compositions as described herein are linked with a viral vector.

[0936] In some embodiments, subjects treated using the methods and compositions are evaluated for improvement in condition using any methods known and described in the art.

[0937] The terms “treat,” “treating”, and “treatment,” and the like are used herein to generally mean obtaining a desired pharmacological and/or physiological effect. The effect may be prophylactic in terms of preventing or partially preventing a disease, symptom or condition thereof and/or may be therapeutic in terms of a partial or complete cure of a disease, condition, symptom or adverse effect attributed to the disease. The term “treatment” as used herein covers any treatment of a disease in a mammal, particularly, a human, and includes: (a) preventing the disease from occurring in a subject which may be predisposed to the disease but has not yet been diagnosed as having it; (b) inhibiting the disease, i.e., arresting its development; or (c) relieving the disease, i.e., mitigating or ameliorating the disease and/or its symptoms or conditions. The term “prophylaxis” is used herein to refer to a measure or measures taken for the prevention or partial prevention of a disease or condition. In some embodiments, the terms “condition,” “disease,” or “disorder,” as used herein, are interchangeable.

[0938] By “treating or preventing a disease or a disorder” is meant ameliorating any of the conditions or signs or symptoms associated with the disorder before or after it has occurred. As compared with an equivalent untreated control, such reduction or degree of prevention is at least 3%, 5%, 10%, 20%, 40%, 50%, 60%, 80%, 90%, 95%, or 100% as measured by any standard technique. A patient who is being treated for a disease or a disorder, is one who a medical practitioner has diagnosed as having such a condition. Diagnosis may be by any suitable means. Diagnosis and monitoring may involve, for example, detecting the presence of pathological cells in a biological sample (e.g., tissue biopsy, blood test, or urine test), detecting the level of a surrogate marker of the disorder in a biological sample, or detecting symptoms associated with the disorder. A patient in whom the development of a disorder is being prevented may or may not have received such a diagnosis. One in the art will understand that these patients may have been subjected to the same standard tests as described above or may have been identified, without examination, as one at high risk due to the presence of one or more risk factors (e.g., family history or genetic predisposition).

### Methods of Cancer Treatment

[0939] Described herein, in certain embodiments, is a method of treating a condition or disease in a subject in need therefor comprising administering to the subject a therapeutically effective amount of the multifunctional polypeptide molecule as described herein, the nucleic acid molecules as described herein, the vector as described herein, the cell as described herein, the pharmaceutical composition as described herein, or a combination thereof, wherein the administering is effective to treat the condition or disease in the subject.

[0940] In some embodiments, the condition or disease is cancer. In some embodiments, the cancer is a solid tumor, a hematological cancer, a metastatic cancer, a soft tissue tumor, or a combination thereof. In some embodiments, the cancer is the solid tumor, and wherein the solid tumor is selected from the group consisting of melanoma, pancreatic cancer, breast cancer, colorectal cancer, lung cancer, skin cancer, ovarian cancer, liver cancer, and a combination thereof. In some embodiments, the cancer is the hematological cancer, and wherein the hematological cancer is selected from the group consisting of Hodgkin's lymphoma, Non-Hodgkin's lymphoma, acute myeloid leukemia (AML), chronic myeloid leukemia, myelodysplastic syndrome, multiple myeloma, T-cell lymphoma, acute lymphocytic leukemia, and a combination thereof. In some embodiments, the Non-Hodgkin's lymphoma is selected from the group consisting of B cell lymphoma, diffuse large B cell lymphoma (DLBCL), follicular lymphoma, chronic lymphocytic leukemia (B-CLL), mantle cell lymphoma, marginal zone B-cell lymphoma, Burkitt lymphoma, lymphoplasmacytic lymphoma, hairy cell leukemia, and a combination thereof. In some embodiments, the T-cell lymphoma is peripheral T-cell lymphoma.

[0941] In some embodiments, the cancer is characterized by a cancer antigen present on the cancer. In some embodiments, the cancer antigen is a tumor antigen, a stromal antigen, or a hematological antigen. In some embodiments, the cancer antigen is selected from the group consisting of BCMA, CD19, CD20, CD22, FcRH5, PDL1, CD47, gangloside 2 (GD2), prostate stem cell antigen (PSCA), prostate specific membrane antigen (PMSA), prostate-specific antigen (PSA), carcinoembryonic antigen (CEA), Ron Kinase, c-Met, Immature laminin receptor, TAG-72, BING-4, Calcium-activated chloride channel 2, Cyclin-B1, 9D7, Ep-CAM, EphA3, Her2/neu, Telomerase, SAP-1, Survivin, NY-ESO-1/LAGE-1, PRAME, SSX-2, Melan-A/MART-1, Gp100/pmel17, Tyrosinase, TRP-1/-2, MC1R, β-catenin, BRCA1/2, CDK4, CML66, Fibronectin, p53, Ras, TGF-B receptor, AFP, ETA, MAGE, MUC-1, CA-125, BAGE, GAGE, NY-ESO-1, β-catenin, CDK4, CDC27, α actinin-4, TRP1/gp75, TRP2, gp100, Melan-A/MART1, gangliosides, WT1, EphA3, Epidermal growth factor receptor (EGFR), MART-2, MART-1, MUC1, MUC2, MUM1, MUM2, MUM3, NA88-1, NPM, OA1, OGT, RCC, RUI1, RUI2, SAGE, TRG, TRP1, TSTA, Folate receptor alpha, L1-CAM, CAIX, gpA33, GD3, GM2, VEGFR, Intergrins, carbohydrates, IGF1R, EPHA3, TRAILR1, TRAILR2, RANKL, FAP, TGF-beta, hyaluronic acid, collagen, tenascin C, and tenascin W.

[0942] Methods described herein include treating a cancer in a subject by using multispecific or multifunctional molecules as described herein, e.g., using a pharmaceutical composition described herein. Also provided are methods for reducing or ameliorating a symptom of a cancer in a subject, as well as methods for inhibiting the growth of a cancer and/or killing one or more cancer cells. In some embodiments, the methods described herein decrease the size of a tumor and/or decrease the number of cancer cells in a subject administered with a described herein or a pharmaceutical composition described herein.

[0943] Described herein are methods of treating a subject having a cancer comprising acquiring a status of one or more TCRBV molecules in a subject. In some embodiments, a higher, e.g., increased, level or activity of one or more TCRβV molecules in a subject, e.g., in a sample from a subject, is indicative of a bias, e.g., a preferential expansion, e.g., clonal expansion, of T cells expressing said one or more TCRβV molecules in the subject.

[0944] Without wishing to be bound by theory, it is believed that a biased T cell population, e.g., a T cell population expressing a TCRβV molecule, is antigen-specific for a disease antigen, e.g., a cancer antigen (Wang C Y, et al., Int J Oncol. (2016) 48(6):2247-56). In some embodiments, the cancer antigen comprises a cancer associated antigen or a neoantigen. In some embodiments, a subject having a cancer, e.g., as described herein, has a higher, e.g., increased, level or activity of one or more TCRβV molecules associated with the cancer. In some embodiments, the TCRβV molecule is associated with, e.g., recognizes, a cancer antigen, e.g., a cancer associated antigen or a neoantigen.

[0945] Accordingly, as described herein are methods of expanding an immune effector cell population obtained from a subject, comprising acquiring a status of one or more TCRβV molecules in a sample from the subject, comprising contacting said immune effector cell population with an anti-TCRβV antibody molecule as described herein, e.g., an anti-TCRβV antibody molecule that binds to the same TCRβV molecule that is higher, e.g., increased in the immune effector cell population in the sample from the subject. In some embodiments, contacting the population of immune effector cells (e.g., comprising T cells that express one or more TCRβV molecules) with an anti-TCRβV molecule results in expansion of the population of immune effector cells expressing one or more TCRβV molecules. In some embodiments, the expanded population, or a portion thereof, is administered to the subject (e.g., same subject from whom the immune effector cell population was obtained), to treat the cancer. In some embodiments, the expanded population, or a portion thereof, is administered to a different subject (e.g., not the same subject from whom the immune effector cell population was obtained), to treat the cancer.

[0946] Also described herein are methods of treating a subject having a cancer, comprising: acquiring a status of one or more TCRβV molecules in a sample from the subject, and determining whether the one or more TCRβV molecules is higher, e.g., increased, in a sample from the subject compared to a reference value, wherein responsive to said determination, administering to the subject an effective amount of an anti-TCRβV antibody molecule, e.g., an agonistic anti-TCRβV antibody molecule, e.g., as described herein.

[0947] In some embodiments, the subject has B-CLL. In some embodiments, a subject having B-CLL has a higher, e.g., increased, level or activity of one or more TCRβV molecules, e.g., one or more TCRβV molecules comprising: (i) TCRβ V6 subfamily comprising, e.g., TCRβ V6-4*01, TCRβ V6-4*02, TCRβ V6-9*01, TCRβ V6-8*01, TCRβ V6-5*01, TCRβ V6-6*02, TCRβ V6-6*01, TCRβ V6-2*01, TCRβ V6-3*01 or TCRβ V6-1*01; (ii) TCRβ V5 subfamily comprising TCRβ V5-6*01, TCRβ V5-4*01, or TCRβ V5-8*01; (iii) TCRβ V3 subfamily comprising TCRβ V3-1*01; (iv) TCRβ V2 subfamily comprising TCRβ V2*01; or (v) TCRβ V19 subfamily comprising TCRβ V19*01, or TCRβ V19*02.

[0948] In some embodiments, a subject having B-CLL has a higher, e.g., increased, level or activity of a TCRβ V6 subfamily comprising, e.g., TCRβ V6-4*01, TCRβ V6-4*02, TCRβ V6-9*01, TCRβ V6-8*01, TCRβ V6-5*01, TCRβ V6-6*02, TCRβ V6-6*01, TCRβ V6-2*01, TCRβ V6-3*01 or TCRβ V6-1*01. In some embodiments, the subject is administered the multifunctional polypeptide molecule as described herein comprising an anti-TCRβV molecule (e.g., an agonistic anti-TCRβV molecule as described herein) that binds to one or more members of the TCRβ V6 subfamily. In some embodiments, administration of the multifunctional polypeptide molecule as described herein results in expansion of immune cells expressing one or more members of the TCRβ V6 subfamily.

[0949] In some embodiments, a subject having B-CLL has a higher, e.g., increased, level or activity of a TCRβ V5 subfamily comprising TCRβ V5-6*01, TCRβ V5-4*01, or TCRβ V5-8*01. In some embodiments, the subject is administered the multifunctional polypeptide molecule as described herein comprising an anti-TCRβV molecule (e.g., an agonistic anti-TCRβV molecule as described herein) that binds to one or more members of the TCRβ V5 subfamily. In some embodiments, administration of the multifunctional polypeptide molecule as described herein results in expansion of immune cells expressing one or more members of the TCRβ V5 subfamily.

[0950] In some embodiments, a subject having B-CLL has a higher, e.g., increased, level or activity of a TCRβ V3 subfamily comprising TCRβ V3-1*01. In some embodiments, the subject is administered the multifunctional polypeptide molecule as described herein comprising an anti-TCRβV molecule (e.g., an agonistic anti-TCRβV molecule as described herein) that binds to one or more members of the TCRβ V3 subfamily. In some embodiments, administration of the multifunctional polypeptide molecule as described herein results in expansion of immune cells expressing one or more members of the TCRβ V3 subfamily.

[0951] In some embodiments, a subject having B-CLL has a higher, e.g., increased, level or activity of a TCRβ V2 subfamily comprising TCRβ V2*01. In some embodiments, the subject is administered the multifunctional polypeptide molecule as described herein comprising an anti-TCRβV molecule (e.g., an agonistic anti-TCRβV molecule as described herein) that binds to one or more members of the TCRβ V2 subfamily. In some embodiments, administration of the multifunctional polypeptide molecule as described herein results in expansion of immune cells expressing one or more members of the TCRβ V2 subfamily.

[0952] In some embodiments, a subject having B-CLL has a higher, e.g., increased, level or activity of a TCRβ V19 subfamily comprising TCRβ V19*01, or TCRβ V19*02. In some embodiments, the subject is administered the multifunctional polypeptide molecule as described herein comprising an anti-TCRβV molecule (e.g., an agonistic anti-TCRBV molecule as described herein) that binds to one or more members of the TCRβ V19 subfamily. In some embodiments, administration of the multifunctional polypeptide molecule as described herein results in expansion of immune cells expressing one or more members of the TCRβ V19 subfamily.

[0953] In some embodiments, the subject has melanoma. In some embodiments, a subject having melanoma has a higher, e.g., increased, level or activity of one or more TCRβV molecules, e.g., one or more TCRβV molecules comprising the TCRβ V6 subfamily comprising, e.g., TCRβ V6-4*01, TCRβ V6-4*02, TCRβ V6-9*01, TCRβ V6-8*01, TCRβ V6-5*01, TCRβ V6-6*02, TCRβ V6-6*01, TCRβ V6-2*01, TCRβ V6-3*01 or TCRβ V6-1*01. In some embodiments, the subject is administered the multifunctional polypeptide molecule as described herein comprising an anti-TCRβV molecule (e.g., an agonistic anti-TCRβV molecule as described herein) that binds to one or more members of the TCRβ V6 subfamily. In some embodiments, administration of the multifunctional polypeptide molecule as described herein results in expansion of immune cells expressing one or more members of the TCRβ V6 subfamily.

[0954] In some embodiments, the subject has DLBCL (diffuse large B-cell lymphoma). In some embodiments, a subject having DLBCL has a higher, e.g., increased, level or activity of one or more TCRβV molecules, e.g., one or more TCRβV molecules comprising: (i) TCRβ V13 subfamily comprising TCRβ V13*01; (ii) TCRβ V3 subfamily comprising TCRβ V3-1*01; or (iii) TCRβ V23 subfamily.

[0955] In some embodiments, a subject having DLBCL has a higher, e.g., increased, level or activity of a TCRβ V13 subfamily comprising TCRβ V13*01. In some embodiments, the subject is administered the multifunctional polypeptide molecule as described herein comprising an anti-TCRβV molecule (e.g., an agonistic anti-TCRβV molecule as described herein) that binds to one or more members of the TCRβ V13 subfamily. In some embodiments, administration of the multifunctional polypeptide molecule as described herein results in expansion of immune cells expressing one or more members of the TCRβ V13 subfamily.

[0956] In some embodiments, a subject having DLBCL has a higher, e.g., increased, level or activity of a TCRβ V3 subfamily comprising TCRβ V3-1*01. In some embodiments, the subject is administered the multifunctional polypeptide molecule as described herein comprising an anti-TCRβV molecule (e.g., an agonistic anti-TCRβV molecule as described herein) that binds to one or more members of the TCRβ V3 subfamily. In some embodiments, administration of the multifunctional polypeptide molecule as described herein results in expansion of immune cells expressing one or more members of the TCRβ V3 subfamily.

[0957] In some embodiments, a subject having DLBCL has a higher, e.g., increased, level or activity of a TCRβ V23 subfamily. In some embodiments, the subject is administered the multifunctional polypeptide molecule as described herein comprising an anti-TCRβV molecule (e.g., an agonistic anti-TCRβV molecule as described herein) that binds to one or more members of the TCRβ V23 subfamily. In some embodiments, administration of the multifunctional polypeptide molecule as described herein results in expansion of immune cells expressing one or more members of the TCRβ V23 subfamily.

[0958] In some embodiments, the subject has CRC (colorectal cancer). In some embodiments, a subject having CRC has a higher, e.g., increased, level or activity of one or more TCRβV molecules, e.g., one or more TCRβV molecules comprising: (i) TCRβ V19 subfamily comprising TCRβ V19*01, or TCRβ V19*02; (ii) TCRβ V12 subfamily comprising TCRβ V12-4*01, TCRβ V12-3*01, or TCRβ V12-5*01; (iii) TCRβ V16 subfamily comprising TCRβ V16*01; or (iv) TCRβ V21 subfamily.

[0959] In some embodiments, a subject having CRC has a higher, e.g., increased, level or activity of a TCRβ V19 subfamily comprising TCRβ V19*01, or TCRβ V19*02. In some embodiments, the subject is administered the multifunctional polypeptide molecule as described herein comprising an anti-TCRβV molecule (e.g., an agonistic anti-TCRβV molecule as described herein) that binds to one or more members of the TCRβ V19 subfamily. In some embodiments, administration of the multifunctional polypeptide molecule as described herein results in expansion of immune cells expressing one or more members of the TCRβ V19 subfamily.

[0960] In some embodiments, a subject having CRC has a higher, e.g., increased, level or activity of a TCRβ V12 subfamily comprising TCRβ V12-4*01, TCRβ V12-3*01, or TCRβ V12-5*01. In some embodiments, the subject is administered the multifunctional polypeptide molecule as described herein comprising an anti-TCRβV molecule (e.g., an agonistic anti-TCRβV molecule as described herein) that binds to one or more members of the TCRβ V12 subfamily. In some embodiments, administration of the multifunctional polypeptide molecule as described herein results in expansion of immune cells expressing one or more members of the TCRβ V12 subfamily.

[0961] In some embodiments, a subject having CRC has a higher, e.g., increased, level or activity of a TCRβ V16 subfamily comprising TCRβ V16*01. In some embodiments, the subject is administered the multifunctional polypeptide molecule as described herein comprising an anti-TCRβV molecule (e.g., an agonistic anti-TCRβV molecule as described herein) that binds to one or more members of the TCRβ V16 subfamily. In some embodiments, administration of the multifunctional polypeptide molecule as described herein results in expansion of immune cells expressing one or more members of the TCRβ V16 subfamily.

[0962] In some embodiments, a subject having CRC has a higher, e.g., increased, level or activity of a TCRβ V21 subfamily. In some embodiments, the subject is administered the multifunctional polypeptide molecule as described herein comprising an anti-TCRβV molecule (e.g., an agonistic anti-TCRβV molecule as described herein) that binds to one or more members of the TCRβ V21 subfamily. In some embodiments, administration of the multifunctional polypeptide molecule as described herein results in expansion of immune cells expressing one or more members of the TCRβ V21 subfamily.

[0963] In some embodiments, acquiring a value for the status, e.g., presence, level and/or activity, of one or more TCRβV molecules comprises acquiring a measure of the T cell receptor (TCR) repertoire of a sample. In some embodiments, the value comprises a measure of the clonotype of a population of T cells in the sample.

[0964] In some embodiments, a value for the status of one or more TCRβV molecules is obtained, e.g., measured, using an assay described in Wang C Y, et al., Int J Oncol. (2016) 48(6):2247-56, the entire contents of which are hereby incorporated by reference.

[0965] In some embodiments, a value for the status of one or more TCRβV molecules is obtained, e.g., measured, using flow cytometry.

### Combination Therapies

[0966] In some embodiments, the method as described herein further comprises administering a second therapeutic agent or therapy to the subject.

[0967] In some embodiments, the second therapeutic agent or therapy comprises a chemotherapeutic agent, a biologic agent, a hormonal therapy, radiation, or surgery.

[0968] In some embodiments, the second therapeutic agent or therapy is administered in combination with the multifunctional polypeptide molecule as described herein, the nucleic acid molecules as described herein, the vector as described herein, the cell as described herein, the pharmaceutical composition as described herein, sequentially, simultaneously, or concurrently.

[0969] The multispecific or multifunctional molecules as described herein can be used in combination with a second therapeutic agent or procedure.

[0970] In some embodiments, the multispecific or multifunctional molecules as described herein and the second therapeutic agent or procedure are administered/performed after a subject has been diagnosed with a cancer, e.g., before the cancer has been eliminated from the subject. In some embodiments, the multispecific or multifunctional molecules as described herein and the second therapeutic agent or procedure are administered/performed simultaneously or concurrently. For example, the delivery of one treatment is still occurring when the delivery of the second commences, e.g., there is an overlap in administration of the treatments. In other embodiments, the multispecific or multifunctional molecules as described herein and the second therapeutic agent or procedure are administered/performed sequentially. For example, the delivery of one treatment ceases before the delivery of the other treatment begins.

[0971] In some embodiments, combination therapy can lead to more effective treatment than monotherapy with either agent alone. In some embodiments, the combination of the first and second treatment is more effective (e.g., leads to a greater reduction in symptoms and/or cancer cells) than the first or second treatment alone. In some embodiments, the combination therapy permits use of a lower dose of the first or the second treatment compared to the dose of the first or second treatment normally required to achieve similar effects when administered as a monotherapy. In some embodiments, the combination therapy has a partially additive effect, wholly additive effect, or greater than additive effect.

[0972] In some embodiments, the anti-TCRBV antibody, multispecific or multifunctional molecule is administered in combination with a therapy, e.g., a cancer therapy (e.g., one or more of anti-cancer agents, immunotherapy, photodynamic therapy (PDT), surgery and/or radiation). The terms “chemotherapeutic,” “chemotherapeutic agent,” and “anti-cancer agent” are used interchangeably herein. The administration of the multispecific or multifunctional molecule and the therapy, e.g., the cancer therapy, can be sequential (with or without overlap) or simultaneous. Administration of the anti-TCRBV antibody, multispecific or multifunctional molecule can be continuous or intermittent during the course of therapy (e.g., cancer therapy). Certain therapies described herein can be used to treat cancers and non-cancerous diseases. For example, PDT efficacy can be enhanced in cancerous and non-cancerous conditions (e.g., tuberculosis) using the methods and compositions described herein (reviewed in, e.g., Agostinis, P. et al. (2011) CA Cancer J. Clin. 61:250-281).

[0973] Methods described herein include treating a cancer in a subject by using the multispecific or multifunctional molecules as described herein, e.g., using a pharmaceutical composition as described herein. Also provided are methods for reducing or ameliorating a symptom of a cancer in a subject, as well as methods for inhibiting the growth of a cancer and/or killing one or more cancer cells. In some embodiments, the methods described herein decrease the size of a tumor and/or decrease the number of cancer cells in a subject administered with a described herein or a pharmaceutical composition described herein.

[0974] In some embodiments, the cancer is a hematological cancer. In some embodiments, the hematological cancer is a leukemia or a lymphoma. As used herein, a “hematologic cancer” refers to a tumor of the hematopoietic or lymphoid tissues, e.g., a tumor that affects blood, bone marrow, or lymph nodes. Exemplary hematologic malignancies include, but are not limited to, leukemia (e.g., acute lymphoblastic leukemia (ALL), acute myeloid leukemia (AML), chronic lymphocytic leukemia (CLL), chronic myelogenous leukemia (CML), hairy cell leukemia, acute monocytic leukemia (AMoL), chronic myelomonocytic leukemia (CMML), juvenile myelomonocytic leukemia (JMML), or large granular lymphocytic leukemia), lymphoma (e.g., AIDS-related lymphoma, cutaneous T-cell lymphoma, Hodgkin lymphoma (e.g., classical Hodgkin lymphoma or nodular lymphocyte-predominant Hodgkin lymphoma), mycosis fungoides, non-Hodgkin lymphoma (e.g., B-cell non-Hodgkin lymphoma (e.g., Burkitt lymphoma, small lymphocytic lymphoma (CLL/SLL), diffuse large B-cell lymphoma, follicular lymphoma, immunoblastic large cell lymphoma, precursor B-lymphoblastic lymphoma, or mantle cell lymphoma) or T-cell non-Hodgkin lymphoma (mycosis fungoides, anaplastic large cell lymphoma, or precursor T-lymphoblastic lymphoma)), primary central nervous system lymphoma, Sdzary syndrome, Waldenström macroglobulinemia), chronic myeloproliferative neoplasm, Langerhans cell histiocytosis, multiple myeloma/plasma cell neoplasm, myelodysplastic syndrome, or myelodysplastic/myeloproliferative neoplasm.

[0975] In some embodiments, the cancer is a myeloproliferative neoplasm, e.g., primary or idiopathic myelofibrosis (MF), essential thrombocytosis (ET), polycythemia vera (PV), or chronic myelogenous leukemia (CML). In some embodiments, the cancer is myelofibrosis. In some embodiments, the subject has myelofibrosis. In some embodiments, the subject has a calreticulin mutation, e.g., a calreticulin mutation as described herein. In some embodiments, the subject does not have the JAK2-V617F mutation. In some embodiments, the subject has the JAK2-V617F mutation. In some embodiments, the subject has a MPL mutation. In some embodiments, the subject does not have a MPL mutation.

[0976] In some embodiments, the cancer is a solid cancer. Exemplary solid cancers include, but are not limited to, ovarian cancer, rectal cancer, stomach cancer, testicular cancer, cancer of the anal region, uterine cancer, colon cancer, rectal cancer, renal-cell carcinoma, liver cancer, non-small cell carcinoma of the lung, cancer of the small intestine, cancer of the esophagus, melanoma, Kaposi's sarcoma, cancer of the endocrine system, cancer of the thyroid gland, cancer of the parathyroid gland, cancer of the adrenal gland, bone cancer, pancreatic cancer, skin cancer, cancer of the head or neck, cutaneous or intraocular malignant melanoma, uterine cancer, brain stem glioma, pituitary adenoma, epidermoid cancer, carcinoma of the cervix squamous cell cancer, carcinoma of the fallopian tubes, carcinoma of the endometrium, carcinoma of the vagina, sarcoma of soft tissue, cancer of the urethra, carcinoma of the vulva, cancer of the penis, cancer of the bladder, cancer of the kidney or ureter, carcinoma of the renal pelvis, spinal axis tumor, neoplasm of the central nervous system (CNS), primary CNS lymphoma, tumor angiogenesis, metastatic lesions of said cancers, or combinations thereof.

[0977] In some embodiments, the cancer is acute lymphoblastic leukemia, acute lymphocytic leukemia, acute myelogenous leukemia, aplastic anemia, chronic myelogenous leukemia, desmoplastic small round cell tumor, Ewing's sarcoma, Hodgkin's disease, multiple myeloma, myelodysplasia, Non-Hodgkin's lymphoma, paroxysmal nocturnal hemoglobinuria, radiation poisoning, chronic lymphocytic leukemia, AL amyloidosis, essential thrombocytosis, polycythemia vera, severe aplastic anemia, neuroblastoma, breast tumors, ovarian tumors, renal cell carcinoma, autoimmune disorders, such as systemic sclerosis, osteopetrosis, inherited metabolic disorders, juvenile chronic arthritis, adrenoleukodystrophy, amegakaryocytic thrombocytopenia, sickle cell disease, severe congenital immunodeficiency, Griscelli syndrome type II, Hurler syndrome, Kostmann syndrome, Krabbe disease, metachromatic leukodystrophy, thalassemia, hemophagocytic lymphohistiocytosis, and Wiskott-Aldrich syndrome, leukemias, lymphomas, melanomas, neuroendocrine tumors, carcinomas and sarcomas. Exemplary cancers that may be treated with a compound, pharmaceutical composition, or method provided herein include lymphoma, sarcoma, bladder cancer, bone cancer, brain tumor, cervical cancer, colon cancer, esophageal cancer, gastric cancer, head and neck cancer, kidney cancer, myeloma, thyroid cancer, leukemia, prostate cancer, breast cancer (e.g. triple negative, ER positive, ER negative, chemotherapy resistant, herceptin resistant, HER2 positive, doxorubicin resistant, tamoxifen resistant, ductal carcinoma, lobular carcinoma, primary, metastatic), ovarian cancer, pancreatic cancer, liver cancer (e.g., hepatocellular carcinoma), lung cancer (e.g. non-small cell lung carcinoma, squamous cell lung carcinoma, adenocarcinoma, large cell lung carcinoma, small cell lung carcinoma, carcinoid, sarcoma), glioblastoma multiforme, glioma, melanoma, prostate cancer, castration-resistant prostate cancer, breast cancer, triple negative breast cancer, glioblastoma, ovarian cancer, lung cancer, squamous cell carcinoma (e.g., head, neck, or esophagus), colorectal cancer, leukemia, acute myeloid leukemia, lymphoma, B cell lymphoma, or multiple myeloma. Additional examples include, cancer of the thyroid, endocrine system, brain, breast, cervix, colon, head & neck, esophagus, liver, kidney, lung, non-small cell lung, melanoma, mesothelioma, ovary, sarcoma, stomach, uterus or Medulloblastoma, Hodgkin's Disease, Non-Hodgkin's Lymphoma, multiple myeloma, neuroblastoma, glioma, glioblastoma multiforme, ovarian cancer, rhabdomyosarcoma, primary thrombocytosis, primary macroglobulinemia, primary brain tumors, cancer, malignant pancreatic insulanoma, malignant carcinoid, urinary bladder cancer, premalignant skin lesions, testicular cancer, lymphomas, thyroid cancer, neuroblastoma, esophageal cancer, genitourinary tract cancer, malignant hypercalcemia, endometrial cancer, adrenal cortical cancer, neoplasms of the endocrine or exocrine pancreas, medullary thyroid cancer, medullary thyroid carcinoma, melanoma, colorectal cancer, papillary thyroid cancer, hepatocellular carcinoma, Paget's Disease of the Nipple, Phyllodes Tumors, Lobular Carcinoma, Ductal Carcinoma, cancer of the pancreatic stellate cells, cancer of the hepatic stellate cells, or prostate cancer. In some embodiments, the cancer is a solid tumor. In some embodiments, the cancer is hematological.

[0978] In some embodiments, the multispecific or multifunctional molecules as described herein (or pharmaceutical composition as described herein) are administered in a manner appropriate to the disease to be treated or prevented. The quantity and frequency of administration will be determined by such factors as the condition of the patient, and the type and severity of the patient's disease. Appropriate dosages may be determined by clinical trials. For example, when “an effective amount” or “a therapeutic amount” is indicated, the precise amount of the pharmaceutical composition (or multispecific or multifunctional molecules) to be administered can be determined by a physician with consideration of individual differences in tumor size, extent of infection or metastasis, age, weight, and condition of the subject. In some embodiments, the pharmaceutical composition described herein can be administered at a dosage of 10⁴ to 10⁹ cells/kg body weight, e.g., 10⁵ to 10⁶ cells/kg body weight, including all integer values within those ranges. In some embodiments, the pharmaceutical composition described herein can be administered multiple times at these dosages. In some embodiments, the pharmaceutical composition described herein can be administered using infusion techniques described in immunotherapy (see, e.g., Rosenberg et al., New Eng. J. of Med. 319:1676, 1988).

[0979] In some embodiments, the multispecific or multifunctional molecules as described herein or the pharmaceutical composition as described herein is administered to the subject parentally. In some embodiments, the cells are administered to the subject intravenously, subcutaneously, intratumorally, intranodally, intramuscularly, intradermally, or intraperitoneally. In some embodiments, the cells are administered, e.g., injected, directly into a tumor or lymph node. In some embodiments, the cells are administered as an infusion (e.g., as described in Rosenberg et al., New Eng. J. of Med. 319:1676, 1988) or an intravenous push. In some embodiments, the cells are administered as an injectable depot formulation.

[0980] In some embodiments, the subject is a mammal. In some embodiments, the subject is a human, monkey, pig, dog, cat, cow, sheep, goat, rabbit, rat, or mouse. In some embodiments, the subject is a human. In some embodiments, the subject is a pediatric subject, e.g., less than 18 years of age, e.g., less than 17, 16, 15, 14, 13, 12, 11, 10, 9, 8, 7, 6, 5, 4, 3, 2, 1 or less years of age. In some embodiments, the subject is an adult, e.g., at least 18 years of age, e.g., at least 19, 20, 21, 22, 23, 24, 25, 25-30, 30-35, 35-40, 40-50, 50-60, 60-70, 70-80, or 80-90 years of age.

### Anti-Cancer Therapies

[0981] In other embodiments, the multispecific or multifunctional molecules as described herein is administered in combination with a low or small molecular weight chemotherapeutic agent. Exemplary low or small molecular weight chemotherapeutic agents include, but not limited to, 13-cis-retinoic acid (isotretinoin, ACCUTANE®), 2-CdA (2-chlorodeoxyadenosine, cladribine, LEUSTATIN™), 5-azacitidine (azacitidine, VIDAZA®), 5-fluorouracil (5-FU, fluorouracil, ADRUCIL®), 6-mercaptopurine (6-MP, mercaptopurine, PURINETHOL®), 6-TG (6-thioguanine, thioguanine, THIOGUANINE TABLOID®), abraxane (paclitaxel protein-bound), actinomycin-D (dactinomycin, COSMEGEN®), alitretinoin (PANRETIN®), all-transretinoic acid (ATRA, tretinoin, VESANOID®), altretamine (hexamethylmelamine, HMM, HEXALEN®), amethopterin (methotrexate, methotrexate sodium, MTX, TREXALL™, RHEUMATREX®), amifostine (ETHYOL®), arabinosylcytosine (Ara-C, cytarabine, CYTOSAR-U®), arsenic trioxide (TRISENOX®), asparaginase (Erwinia L-asparaginase, L-asparaginase, ELSPAR®, KIDROLASE®), BCNU (carmustine, BiCNU®), bendamustine (TREANDA®), bexarotene (TARGRETIN®), bleomycin (BLENOXANE®), busulfan (BUSULFEX®, MYLERAN®), calcium leucovorin (Citrovorum Factor, folinic acid, leucovorin), camptothecin-11 (CPT-11, irinotecan, CAMPTOSAR®), capecitabine (XELODA®), carboplatin (PARAPLATIN®), carmustine wafer (prolifeprospan 20 with carmustine implant, GLIADEL® wafer), CCI-779 (temsirolimus, TORISEL®), CCNU (lomustine, CeeNU), CDDP (cisplatin, PLATINOL®, PLATINOL-AQ®), chlorambucil (leukeran), cyclophosphamide (CYTOXAN®, NEOSAR®), dacarbazine (DIC, DTIC, imidazole carboxamide, DTIC-DOME®), daunomycin (daunorubicin, daunorubicin hydrochloride, rubidomycin hydrochloride, CERUBIDINE®), decitabine (DACOGEN®), dexrazoxane (ZINECARD®), DHAD (mitoxantrone, NOVANTRONE®), docetaxel (TAXOTERE®), doxorubicin (ADRIAMYCIN®, RUBEX®), epirubicin (ELLENCE™), estramustine (EMCYT®), etoposide (Vβ-16, etoposide phosphate, TOPOSAR®, VEPESID®, ETOPOPHOS®), floxuridine (FUDR®), fludarabine (FLUDARA®), fluorouracil (cream) (CARAC™, EFUDEX®, FLUOROPLEX®), gemcitabine (GEMZAR®), hydroxyurea (HYDREA®, DROXIA™, MYLOCEL™), idarubicin (IDAMYCIN®), ifosfamide (IFEX®), ixabepilone (IXEMPRA™), LCR (leurocristine, vincristine, VCR, ONCOVIN®, VINCASAR PFS®), L-PAM (L-sarcolysin, melphalan, phenylalanine mustard, ALKERAN®), mechlorethamine (mechlorethamine hydrochloride, mustine, nitrogen mustard, MUSTARGEN®), mesna (MESNEX™), mitomycin (mitomycin-C, MTC, MUTAMYCIN®), nelarabine (ARRANON®), oxaliplatin (ELOXATIN™), paclitaxel (TAXOL®, ONXALT^{M}), pegaspargase (PEG-L-asparaginase, ONCOSPAR®), PEMETREXED (ALIMTA®), pentostatin (NIPENT®), procarbazine (MATULANE®), streptozocin (ZANOSAR®), temozolomide (TEMODAR®), teniposide (VM-26, VUMON®), TESPA (thiophosphoamide, thiotepa, TSPA, THIOPLEX®), topotecan (HYCAMTIN®), vinblastine (vinblastine sulfate, vincaleukoblastine, VLB, ALKABAN-AQ®, VELBAN®), vinorelbine (vinorelbine tartrate, NAVELBINE®), and vorinostat (ZOLINZA®).

[0982] In another embodiment, the multispecific or multifunctional molecules as described herein is administered in conjunction with a biologic. Biologics useful in the treatment of cancers are known in the art and a binding molecule as described herein may be administered, for example, in conjunction with such known biologics. For example, the FDA has approved the following biologics for the treatment of breast cancer: HERCEPTIN® (trastuzumab, Genentech Inc., South San Francisco, Calif.; a humanized monoclonal antibody that has anti-tumor activity in HER2-positive breast cancer); FASLODEX® (fulvestrant, AstraZeneca Pharmaceuticals, LP, Wilmington, Del.; an estrogen-receptor antagonist used to treat breast cancer); ARIMIDEX® (anastrozole, AstraZeneca Pharmaceuticals, LP; a nonsteroidal aromatase inhibitor which blocks aromatase, an enzyme needed to make estrogen); Aromasin® (exemestane, Pfizer Inc., New York, N.Y.; an irreversible, steroidal aromatase inactivator used in the treatment of breast cancer); FEMARA® (letrozole, Novartis Pharmaceuticals, East Hanover, N.J.; a nonsteroidal aromatase inhibitor approved by the FDA to treat breast cancer); and NOLVADEX® (tamoxifen, AstraZeneca Pharmaceuticals, LP; a nonsteroidal antiestrogen approved by the FDA to treat breast cancer). Other biologics with which the binding molecules as described herein may be combined include: AVASTIN® (bevacizumab, Genentech Inc.; the first FDA-approved therapy designed to inhibit angiogenesis); and ZEVALIN® (ibritumomab tiuxetan, Biogen Idec, Cambridge, Mass.; a radiolabeled monoclonal antibody currently approved for the treatment of B-cell lymphomas).

[0983] In addition, the FDA has approved the following biologics for the treatment of colorectal cancer: AVASTIN®; ERBITUX® (cetuximab, ImClone Systems Inc., New York, N.Y., and Bristol-Myers Squibb, New York, N.Y.; is a monoclonal antibody directed against the epidermal growth factor receptor (EGFR)); GLEEVEC® (imatinib mesylate; a protein kinase inhibitor); and ERGAMISOL® (levamisole hydrochloride, Janssen Pharmaceutica Products, LP, Titusville, N.J.; an immunomodulator approved by the FDA in 1990 as an adjuvant treatment in combination with 5-fluorouracil after surgical resection in patients with Dukes' Stage C colon cancer).

[0984] For the treatment of lung cancer, exemplary biologics include TARCEVA® (erlotinib HCL, OSI Pharmaceuticals Inc., Melville, N.Y.; a small molecule designed to target the human epidermal growth factor receptor 1 (HER1) pathway).

[0985] For the treatment of multiple myeloma, exemplary biologics include VELCADE® (bortezomib, Millennium Pharmaceuticals, Cambridge Mass.; a proteasome inhibitor). Additional biologics include THALIDOMID® (thalidomide, Clegene Corporation, Warren, N.J.; an immunomodulatory agent and appears to have multiple actions, including the ability to inhibit the growth and survival of myeloma cells and anti-angiogenesis).

[0986] Additional exemplary cancer therapeutic antibodies include, but are not limited to, 3F8, abagovomab, adecatumumab, afutuzumab, alacizumab pegol, alemtuzumab (CAMPATH®, MABCAMPATH®), altumomab pentetate (HYBRI-CEAKERR), anatumomab mafenatox, anrukinzumab (IMA-638), apolizumab, arcitumomab (CEA-SCAN®), bavituximab, bectumomab (LYMPHOSCAN®), belimumab (BENLYSTAR, LYMPHOSTAT-B®), besilesomab (SCINTIMUN®), bevacizumab (AVASTIN®), bivatuzumab mertansine, blinatumomab, brentuximab vedotin, cantuzumab mertansine, capromab pendetide (PROSTASCINT®), catumaxomab (REMOVAB®), CC49, cetuximab (C225, ERBITUX®), citatuzumab bogatox, cixutumumab, clivatuzumab tetraxetan, conatumumab, dacetuzumab, denosumab (PROLIA®), detumomab, ecromeximab, edrecolomab (PANOREX®), elotuzumab, epitumomab cituxetan, epratuzumab, ertumaxomab (REXOMUN®), etaracizumab, farletuzumab, figitumumab, fresolimumab, galiximab, gemtuzumab ozogamicin (MYLOTARGR), girentuximab, glembatumumab vedotin, ibritumomab (ibritumomab tiuxetan, ZEVALIN®), igovomab (INDIMACIS-125®), intetumumab, inotuzumab ozogamicin, ipilimumab, iratumumab, labetuzumab (CEA-CIDE®), lexatumumab, lintuzumab, lucatumumab, lumiliximab, mapatumumab, matuzumab, milatuzumab, minretumomab, mitumomab, nacolomab tafenatox, naptumomab estafenatox, necitumumab, nimotuzumab (THERACIM®, THERALOC®), nofetumomab merpentan (VERLUMAR), ofatumumab (ARZERRAR), olaratumab, oportuzumab monatox, oregovomab (OVAREX®), panitumumab (VECTIBIX®), pemtumomab (THERAGYN®), pertuzumab (OMNITARGR), pintumomab, pritumumab, ramucirumab, ranibizumab (LUCENTIS®), rilotumumab, rituximab (MABTHERA®, RITUXAN®), robatumumab, satumomab pendetide, sibrotuzumab, siltuximab, sontuzumab, tacatuzumab tetraxetan (AFP-CIDE®), taplitumomab paptox, tenatumomab, TGN1412, ticilimumab (tremelimumab), tigatuzumab, TNX-650, tositumomab (BEXXARR), trastuzumab (HERCEPTIN®), tremelimumab, tucotuzumab celmoleukin, veltuzumab, volociximab, votumumab (HUMASPECT®), zalutumumab (HUMAX-EGFRR), and zanolimumab (HUMAX-CD4®).

[0987] In some embodiments, the multispecific or multifunctional molecules as described herein are administered in combination with a viral cancer therapeutic agent. Exemplary viral cancer therapeutic agents include, but not limited to, vaccinia virus (vvDD-CDSR), carcinoembryonic antigen-expressing measles virus, recombinant vaccinia virus (TK-deletion plus GM-CSF), Seneca Valley virus-001, Newcastle virus, coxsackie virus A21, GL-ONC1, EBNA1 C-terminal/LMP2 chimeric protein-expressing recombinant modified vaccinia Ankara vaccine, carcinoembryonic antigen-expressing measles virus, G207 oncolytic virus, modified vaccinia virus Ankara vaccine expressing p53, OncoVEX GM-CSF modified herpes-simplex 1 virus, fowlpox virus vaccine vector, recombinant vaccinia prostate-specific antigen vaccine, human papillomavirus 16/18 L1 virus-like particle/AS04 vaccine, MVA-EBNA1/LMP2 Inj. vaccine, quadrivalent HPV vaccine, quadrivalent human papillomavirus (types 6, 11, 16, 18) recombinant vaccine (GARDASIL®), recombinant fowlpox-CEA(6D)/TRICOM vaccine; recombinant vaccinia-CEA(6D)-TRICOM vaccine, recombinant modified vaccinia Ankara-5T4 vaccine, recombinant fowlpox-TRICOM vaccine, oncolytic herpes virus NV1020, HPV L1 VLP vaccine V504, human papillomavirus bivalent (types 16 and 18) vaccine (CERVARIX®), herpes simplex virus HF10, Ad5CMV-p53 gene, recombinant vaccinia DF3/MUC1 vaccine, recombinant vaccinia-MUC-1 vaccine, recombinant vaccinia-TRICOM vaccine, ALVAC MART-1 vaccine, replication-defective herpes simplex virus type I (HSV-1) vector expressing human Preproenkephalin (NP2), wild-type reovirus, reovirus type 3 Dearing (REOLYSIN®), oncolytic virus HSV1716, recombinant modified vaccinia Ankara (MVA)-based vaccine encoding Epstein-Barr virus target antigens, recombinant fowlpox-prostate specific antigen vaccine, recombinant vaccinia prostate-specific antigen vaccine, recombinant vaccinia-B7.1 vaccine, rAd-p53 gene, Ad5-delta24RGD, HPV vaccine 580299, JX-594 (thymidine kinase-deleted vaccinia virus plus GM-CSF), HPV-16/18 L1/AS04, fowlpox virus vaccine vector, vaccinia-tyrosinase vaccine, MEDI-517 HPV-16/18 VLP AS04 vaccine, adenoviral vector containing the thymidine kinase of herpes simplex virus TK99UN, HspE7, FP253/Fludarabine, ALVAC(2) melanoma multi-antigen therapeutic vaccine, ALVAC-hB7.1, canarypox-hIL-12 melanoma vaccine, Ad-REIC/Dkk-3, rAd-IFN SCH 721015, TIL-Ad-INFg, Ad-ISF35, and coxsackievirus A21 (CVA21, CAVATAK®).

[0988] In some embodiments, the multispecific or multifunctional molecules as described herein are administered in combination with a nanopharmaceutical. Exemplary cancer nanopharmaceuticals include, but not limited to, ABRAXANE® (paclitaxel bound albumin nanoparticles), CRLX101 (CPT conjugated to a linear cyclodextrin-based polymer), CRLX288 (conjugating docetaxel to the biodegradable polymer poly (lactic-co-glycolic acid)), cytarabine liposomal (liposomal Ara-C, DEPOCYT™), daunorubicin liposomal (DAUNOXOME®), doxorubicin liposomal (DOXIL®, CAELYX®), encapsulated-daunorubicin citrate liposome (DAUNOXOME®), and PEG anti-VEGF aptamer (MACUGEN®).

[0989] In some embodiments, the multispecific or multifunctional molecules as described herein are administered in combination with paclitaxel or a paclitaxel formulation, e.g., TAXOL®, protein-bound paclitaxel (e.g., ABRAXANE®). Exemplary paclitaxel formulations include, but are not limited to, nanoparticle albumin-bound paclitaxel (ABRAXANE®, marketed by Abraxis Bioscience), docosahexaenoic acid bound-paclitaxel (DHA-paclitaxel, Taxoprexin, marketed by Protarga), polyglutamate bound-paclitaxel (PG-paclitaxel, paclitaxel poliglumex, CT-2103, XYOTAX, marketed by Cell Therapeutic), the tumor-activated prodrug (TAP), ANG105 (Angiopep-2 bound to three molecules of paclitaxel, marketed by ImmunoGen), paclitaxel-EC-1 (paclitaxel bound to the erbB2-recognizing peptide EC-1; see Li et al., Biopolymers (2007) 87:225-230), and glucose-conjugated paclitaxel (e.g., 2′-paclitaxel methyl 2-glucopyranosyl succinate, see Liu et al., Bioorganic & Medicinal Chemistry Letters (2007) 17:617-620).

[0990] Exemplary RNAi and antisense RNA agents for treating cancer include, but not limited to, CALAA-01, siG12D LODER (Local Drug EluteR), and ALN-VSP02.

[0991] Other cancer therapeutic agents include, but not limited to, cytokines (e.g., aldesleukin (IL-2, Interleukin-2, PROLEUKIN®), alpha Interferon (IFN-alpha, Interferon alfa, INTRON® A (Interferon alfa-2b), ROFERON-A® (Interferon alfa-2a)), Epoetin alfa (PROCRIT®), filgrastim (G-CSF, Granulocyte-Colony Stimulating Factor, NEUPOGEN®), GM-CSF (Granulocyte Macrophage Colony Stimulating Factor, sargramostim, LEUKINE™), IL-11 (Interleukin-11, oprelvekin, NEUMEGA®), Interferon alfa-2b (PEG conjugate) (PEG interferon, PEG-INTRON™), and pegfilgrastim (NEULASTA™)), hormone therapy agents (e.g., aminoglutethimide (CYTADREN®), anastrozole (ARIMIDEX®), bicalutamide (CASODEX®), exemestane (AROMASIN®), fluoxymesterone (HALOTESTIN®), flutamide (EULEXIN®), fulvestrant (FASLODEX®), goserelin (ZOLADEX®), letrozole (FEMARAR), leuprolide (ELIGARD™, LUPRON®, LUPRON DEPOT®, VIADUR™), megestrol (megestrol acetate, MEGACE®), nilutamide (ANANDRON®, NILANDRON®), octreotide (octreotide acetate, SANDOSTATIN®, SANDOSTATIN LAR®), raloxifene (EVISTA®), romiplostim (NPLATE®), tamoxifen (NOVALDEX®), and toremifene (FARESTON®)), phospholipase A2 inhibitors (e.g., anagrelide (AGRYLIN®)), biologic response modifiers (e.g., BCG (THERACYS®, TICE®), and Darbepoetin alfa (ARANESP®)), target therapy agents (e.g., bortezomib (VELCADE®), dasatinib (SPRYCEL™), denileukin diftitox (ONTAK®), erlotinib (TARCEVA®), everolimus (AFINITOR®), gefitinib (IRESSA®), imatinib mesylate (STI-571, GLEEVEC™), lapatinib (TYKERB®), sorafenib (NEXAVAR®), and SU11248 (sunitinib, SUTENT®)), immunomodulatory and antiangiogenic agents (e.g., CC-5013 (lenalidomide, REVLIMID®), and thalidomide (THALOMID®)), glucocorticosteroids (e.g., cortisone (hydrocortisone, hydrocortisone sodium phosphate, hydrocortisone sodium succinate, ALA-CORT®, HYDROCORT ACETATE®, hydrocortone phosphate LANACORT®, SOLU-CORTEF®), decadron (dexamethasone, dexamethasone acetate, dexamethasone sodium phosphate, DEXASONE®, DIODEX®, HEXADROL®, MAXIDEX®), methylprednisolone (6-methylprednisolone, methylprednisolone acetate, methylprednisolone sodium succinate, DURALONE®, MEDRALONE®, MEDROL®, M-PREDNISOL®, SOLU-MEDROL®), prednisolone (DELTA-CORTEF®, ORAPRED®, PEDIAPRED®, PRELONE®), and prednisone (DELTASONE®, LIQUID PRED®, METICORTEN®, ORASONE®)), and bisphosphonates (e.g., pamidronate (AREDIA®), and zoledronic acid (ZOMETA®)).

[0992] In some embodiments, the multispecific or multifunctional molecules as described herein are used in combination with a tyrosine kinase inhibitor (e.g., a receptor tyrosine kinase (RTK) inhibitor). Exemplary tyrosine kinase inhibitor include, but are not limited to, an epidermal growth factor (EGF) pathway inhibitor (e.g., an epidermal growth factor receptor (EGFR) inhibitor), a vascular endothelial growth factor (VEGF) pathway inhibitor (e.g., an antibody against VEGF, a VEGF trap, a vascular endothelial growth factor receptor (VEGFR) inhibitor (e.g., a VEGFR-1 inhibitor, a VEGFR-2 inhibitor, a VEGFR-3 inhibitor)), a platelet derived growth factor (PDGF) pathway inhibitor (e.g., a platelet derived growth factor receptor (PDGFR) inhibitor (e.g., a PDGFR-β inhibitor)), a RAF-1 inhibitor, a KIT inhibitor and a RET inhibitor. In some embodiments, the anti-cancer agent used in combination with the AHCM agent is selected from the group consisting of: axitinib (AG013736), bosutinib (SKI-606), cediranib (RECENTIN™, AZD2171), dasatinib (SPRYCEL®, BMS-354825), erlotinib (TARCEVAR), gefitinib (IRESSA®), imatinib (Gleevec®, CGP57148B, STI-571), lapatinib (TYKERB®, TYVERB®), lestaurtinib (CEP-701), neratinib (HKI-272), nilotinib (TASIGNA®), semaxanib (semaxinib, SU5416), sunitinib (SUTENT®, SU11248), toceranib (PALLADIA®), vandetanib (ZACTIMA®, ZD6474), vatalanib (PTK787, PTK/ZK), trastuzumab (HERCEPTIN®), bevacizumab (AVASTIN®), rituximab (RITUXAN®), cetuximab (ERBITUX®), panitumumab (VECTIBIX®), ranibizumab (Lucentis®), nilotinib (TASIGNA®), sorafenib (NEXAVAR®), alemtuzumab (CAMPATH®), gemtuzumab ozogamicin (MYLOTARG®), ENMD-2076, PCI-32765, AC220, dovitinib lactate (TKI258, CHIR-258), BIBW 2992 (TOVOK™), SGX523, PF-04217903, PF-02341066, PF-299804, BMS-777607, ABT-869, MP470, BIBF 1120 (VARGATEF®), AP24534, JNJ-26483327, MGCD265, DCC-2036, BMS-690154, CEP-11981, tivozanib (AV-951), OSI-930, MM-121, XL-184, XL-647, XL228, AEE788, AG-490, AST-6, BMS-599626, CUDC-101, PD153035, pelitinib (EKB-569), vandetanib (zactima), WZ3146, WZ4002, WZ8040, ABT-869 (linifanib), AEE788, AP24534 (ponatinib), AV-951 (tivozanib), axitinib, BAY 73-4506 (regorafenib), brivanib alaninate (BMS-582664), brivanib (BMS-540215), cediranib (AZD2171), CHIR-258 (dovitinib), CP 673451, CYC116, E7080, Ki8751, masitinib (AB1010), MGCD-265, motesanib diphosphate (AMG-706), MP-470, OSI-930, Pazopanib Hydrochloride, PD173074, Sorafenib Tosylate (Bay 43-9006), SU 5402, TSU-68 (SU6668), vatalanib, XL880 (GSK1363089, EXEL-2880). Selected tyrosine kinase inhibitors are chosen from sunitinib, erlotinib, gefitinib, or sorafenib. In some embodiments, the tyrosine kinase inhibitor is sunitinib.

[0993] In some embodiments, the multispecific or multifunctional molecules as described herein are administered in combination with one of more of: an anti-angiogenic agent, or a vascular targeting agent or a vascular disrupting agent. Exemplary anti-angiogenic agents include, but are not limited to, VEGF inhibitors (e.g., anti-VEGF antibodies (e.g., bevacizumab); VEGF receptor inhibitors (e.g., itraconazole); inhibitors of cell proliferatin and/or migration of endothelial cells (e.g., carboxyamidotriazole, TNP-470); inhibitors of angiogenesis stimulators (e.g., suramin), among others. A vascular-targeting agent (VTA) or vascular disrupting agent (VDA) is designed to damage the vasculature (blood vessels) of cancer tumors causing central necrosis (reviewed in, e.g., Thorpe, P. E. (2004) Clin. Cancer Res. Vol. 10:415-427). VTAs can be small-molecule. Exemplary small-molecule VTAs include, but are not limited to, microtubule destabilizing drugs (e.g., combretastatin A-4 disodium phosphate (CA4P), ZD6126, AVE8062, Oxi 4503); and vadimezan (ASA404).

### Immune Checkpoint Inhibitors

[0994] In other embodiments, methods described herein comprise use of an immune checkpoint inhibitor in combination with the multispecific or multifunctional molecules as described herein. The methods can be used in a therapeutic protocol in vivo.

[0995] In some embodiments, an immune checkpoint inhibitor inhibits a checkpoint molecule. Exemplary checkpoint molecules include but are not limited to CTLA4, PD1, PD-L1, PD-L2, TIM3, LAG3, CD160, 2B4, CD80, CD86, B7-H3 (CD276), B7-H4 (VTCN1), HVEM (TNFRSF14 or CD270), BTLA, KIR, MHC class I, MHC class II, GAL9, VISTA, BTLA, TIGIT, LAIR1, and A2aR. See, e.g., Pardoll. Nat. Rev. Cancer 12.4(2012):252-64, incorporated herein by reference.

[0996] In some embodiments, the immune checkpoint inhibitor is a PD-1 inhibitor, e.g., an anti-PD-1 antibody such as Nivolumab, Pembrolizumab or Pidilizumab. Nivolumab (also called MDX-1106, MDX-1106-04, ONO-4538, or BMS-936558) is a fully human IgG4 monoclonal antibody that specifically inhibits PD1. See, e.g., U.S. Pat. No. 8,008,449 and WO2006/121168. Pembrolizumab (also called Lambrolizumab, MK-3475, MK03475, SCH-900475 or KEYTRUDA®; Merck) is a humanized IgG4 monoclonal antibody that binds to PD-1. See, e.g., Hamid, O. et al. (2013) New England Journal of Medicine 369 (2): 134-44, U.S. Pat. No. 8,354,509 and WO2009/114335. Pidilizumab (also called CT-011 or Cure Tech) is a humanized IgG1k monoclonal antibody that binds to PD1. See, e.g., WO2009/101611. In some embodiments, the inhibitor of PD-1 is an antibody molecule having a sequence substantially identical or similar thereto, e.g., a sequence at least 85%, 90%, 95% identical or higher to the sequence of Nivolumab, Pembrolizumab or Pidilizumab. Additional anti-PD1 antibodies, e.g., AMP 514 (Amplimmune), are described, e.g., in U.S. Pat. No. 8,609,089, US 2010028330, and/or US 20120114649.

[0997] In some embodiments, the PD-1 inhibitor is an immunoadhesin, e.g., an immunoadhesin comprising an extracellular/PD-1 binding portion of a PD-1 ligand (e.g., PD-L1 or PD-L2) that is fused to a constant region (e.g., an Fc region of an immunoglobulin). In some embodiments, the PD-1 inhibitor is AMP-224 (B7-DCIg, e.g., described in WO2011/066342 and WO2010/027827), a PD-L2 Fc fusion soluble receptor that blocks the interaction between B7-H1 and PD-1.

[0998] In some embodiments, the immune checkpoint inhibitor is a PD-L1 inhibitor, e.g., an antibody molecule. In some embodiments, the PD-L1 inhibitor is YW243.55.570, MPDL3280A, MEDI-4736, MSB-0010718C, or MDX-1105. In some embodiments, the anti-PD-L1 antibody is MSB0010718C (also called A09-246-2; Merck Serono), which is a monoclonal antibody that binds to PD-L1. Exemplary humanized anti-PD-L1 antibodies are described, e.g., in WO2013/079174. In some embodiments, the PD-L1 inhibitor is an anti-PD-L1 antibody, e.g., YW243.55.570. The YW243.55.570 antibody is described, e.g., in WO 2010/077634. In some embodiments, the PD-L1 inhibitor is MDX-1105 (also called BMS-936559), which is described, e.g., in WO2007/005874. In some embodiments, the PD-L1 inhibitor is MDPL3280A (Genentech/Roche), which is a human Fc-optimized IgG1 monoclonal antibody against PD-L1. See, e.g., U.S. Pat. No. 7,943,743 and U.S Publication No.: 20120039906. In some embodiments, the inhibitor of PD-L1 is an antibody molecule having a sequence substantially identical or similar thereto, e.g., a sequence at least 85%, 90%, 95% identical or higher to the sequence of YW243.55.S70, MPDL3280A, MEDI-4736, MSB-0010718C, or MDX-1105.

[0999] In some embodiments, the immune checkpoint inhibitor is a PD-L2 inhibitor, e.g., AMP-224 (which is a PD-L2 Fc fusion soluble receptor that blocks the interaction between PD1 and B7-H1. See, e.g., WO2010/027827 and WO2011/066342.

[1000] In some embodiments, the immune checkpoint inhibitor is a LAG-3 inhibitor, e.g., an anti LAG-3 antibody molecule. In some embodiments, the anti-LAG-3 antibody is BMS-986016 (also called BMS986016; Bristol-Myers Squibb). BMS-986016 and other humanized anti-LAG-3 antibodies are described, e.g., in US 2011/0150892, WO2010/019570, and WO2014/008218.

[1001] In some embodiments, the immune checkpoint inhibitor is a TIM-3 inhibitor, e.g., anti-TIM3 antibody molecule, e.g., described in U.S. Pat. No. 8,552,156, WO 2011/155607, EP 2581113 and U.S Publication No.: 2014/044728.

[1002] In some embodiments, the immune checkpoint inhibitor is a CTLA-4 inhibitor, e.g., anti-CTLA-4 antibody molecule. Exemplary anti-CTLA4 antibodies include Tremelimumab (IgG2 monoclonal antibody from Pfizer, formerly known as ticilimumab, CP-675,206); and Ipilimumab (also called MDX-010, CAS No. 477202-00-9). Other exemplary anti-CTLA-4 antibodies are described, e.g., in U.S. Pat. No. 5,811,097.

### Method of Expanding Cells

[1003] Any of the compositions and methods described herein can be used to expand an immune cell population. An immune cell provided herein includes an immune cell derived from a hematopoietic stem cell or an immune cell derived from a non-hematopoietic stem cell, e.g., by differentiation or de-differentiation.

[1004] An immune cell includes a hematopoietic stem cell, progeny thereof and/or cells that have differentiated from said HSC, e.g., lymphoid cells or myeloid cells. An immune cell can be an adaptive immune cell or an innate immune cell. Examples of immune cells include T cells, B cells, Natural Killer cells, Natural Killer T cells, neutrophils, dendritic cells, monocytes, macrophages, and granulocytes.

[1005] In some embodiments, an immune cell is a T cell. In some embodiments, a T cell includes a CD4+ T cell, a CD8+ T cell, a TCR alpha-beta T cell, a TCR gamma-delta T cell. In some embodiments, a T cell comprises a memory T cell (e.g., a central memory T cell, or an effector memory T cell (e.g., a TEMRA) or an effector T cell. In some embodiments, a T cell comprises a tumor infiltrating lymphocyte (TIL).

[1006] In some embodiments, an immune cell is an NK cell.

[1007] In some embodiments, an immune cell is a TIL. TILs are immune cells (e.g., T cells, B cells or NK cells) that can be found in a tumor or around a tumor (e.g., in the stroma or tumor microenvironment of a tumor), e.g., a solid tumor, e.g., as described herein. TILs can be obtained from a sample from a subject having cancer, e.g., a biopsy or a surgical sample. In some embodiments, TILs can be expanded using a method as described herein. In some embodiments, a population of expanded TILs, e.g., expanded using a method as described herein, can be administered to a subject to treat a disease, e.g., a cancer.

[1008] In some embodiments, immune cells, e.g., T cells (e.g., TILs), can be obtained from a unit of blood collected from a subject using any number of techniques known to the skilled artisan, such as Ficoll™ separation. In one aspect, cells from the circulating blood of an individual are obtained by apheresis. The apheresis product typically contains lymphocytes, including T cells, monocytes, granulocytes, B cells, other nucleated white blood cells, red blood cells, and platelets. In one aspect, the cells collected by apheresis may be washed to remove the plasma fraction and, optionally, to place the cells in an appropriate buffer or media for subsequent processing steps. In one embodiment, the cells are washed with phosphate buffered saline (PBS). In an alternative embodiment, the wash solution lacks calcium and may lack magnesium or may lack many if not all divalent cations. The methods described herein can include more than one selection step, e.g., more than one depletion step.

[1009] In one embodiment, the methods as described herein can utilize culture media conditions comprising DMEM, DMEM F12, RPMI 1640, and/or AIM V media. The media can be supplemented with glutamine, HEPES buffer (e.g., 10 mM), serum (e.g., heat-inactivated serum, e.g., 10%), and/or beta mercaptoethanol (e.g., 55 uM). In some embodiments, the culture conditions as described herein comprise one or more supplements, cytokines, growth factors, or hormones. In some embodiments, the culture condition comprises one or more of IL-2, IL-15, or IL-7, or a combination thereof.

[1010] Immune effector cells such as T cells may be activated and expanded generally using methods as described, for example, in U.S. Pat. Nos. 6,352,694; 6,534,055; or 6,905,680. Generally, a population of immune cells, may be expanded by contact with an agent that stimulates a CD3/TCR complex associated signal and a ligand that stimulates a costimulatory molecule on the surface of the T cells; and/or by contact with a cytokine, e.g., IL-2, IL-15 or IL-7. T cell expansion protocols can also include stimulation, such as by contact with an anti-CD3 antibody, or antigen-binding fragment thereof, or an anti-CD2 antibody immobilized on a surface, or by contact with a protein kinase C activator (e.g., bryostatin) in conjunction with a calcium ionophore. For example, a population of T cells can be contacted with an anti-CD3 antibody and an anti-CD28 antibody, under conditions appropriate for stimulating proliferation of the T cells. To stimulate proliferation of either CD4+ T cells or CD8+ T cells, an anti-CD3 antibody and an anti-CD28 antibody can be used. Examples of an anti-CD28 antibody include 9.3, B-T3, XR-CD28 (Diaclone, Besangon, France) can be used as can other methods commonly known in the art (Berg et al., Transplant Proc. 30(8):3975-3977, 1998; Haanen et al., J. Exp. Med. 190(9):13191328, 1999; Garland et al., J. Immunol Meth. 227(1-2):53-63, 1999).

[1011] In some embodiments, a TIL population can also be expanded by methods known in the art. For example, a population of TILs can be expanded as described in Hall et al., Journal for ImmunoTherapy of Cancer (2016) 4:61, the entire contents of which are hereby incorporated by reference. Briefly, TILs can be isolated from a sample by mechanical and/or physical digestion. The resultant TIL population can be stimulated with an anti-CD3 antibody in the presence of non-dividing feeder cells. In some embodiments, the TIL population can be cultured, e.g., expanded, in the presence of IL-2, e.g., human IL-2. In some embodiments, the TIL cells can be cultured, e.g., expanded for a period of at least 1-21 days, e.g., at least 1, 2, 3, 4, 5, 6, 7, 8, 9, 10, 11, 12, 13, 14, 15, 16, 17, 18, 19, 20 or 21 days.

[1012] As described herein, in some embodiments, an immune cell population (e.g., a T cell (e.g., a TEMRA cell or a TIL population) can be expanded by contacting the immune cell population with the multifunctional polypeptide molecule as described herein.

[1013] In some embodiments, the expansion occurs in vivo, e.g., in a subject. In some embodiments, a subject is administered the multifunctional polypeptide molecule as described herein resulting in expansion of immune cells in vivo.

[1014] In some embodiments, the expansion occurs ex vivo, e.g., in vitro. In some embodiments, cells from a subject, e.g., T cells, e.g., TIL cells, are expanded in vitro with the multifunctional polypeptide molecule as described herein. In some embodiments, the expanded TILs are administered to the subject to treat a disease or a symptom of a disease.

[1015] In some embodiments, a method of expansion as described herein results in an expansion of at least 1.1-10 fold, 10-20 fold, or 20-50 fold expansion. In some embodiments, the expansion is at least 1.1, 1.2, 1.3, 1.4, 1.5, 2, 3, 4, 5, 6, 7, 8, 9, 10, 15, 20, 25, 30, 35, 40, 45, 50, 55, 60, 65, 70, 75, 80, 85, 90, 100, 200, 300, 400, 500, 600, 700, 800, 900, 1000, 1500, 2000, 2500, 3000, 3500, 400, 4500, 5000, 5500, 6000, 6500, 7000, 7500, 8000, 8500, 9000, 9500, or 10000 fold expansion.

[1016] In some embodiments, a method of expansion as described herein comprises culturing, e.g., expanding, the cells for at least about 4 hours, 6 hours, 10 hours, 12 hours, 15 hours, 18 hours, 20 hours, or 22 hours. In some embodiments, a method of expansion as described herein comprises culturing, e.g., expanding, the cells for at least 1, 2, 3, 4, 5, 6, 7, 8, 9, 10, 11, 12, 13, 14, 15, 1, 6 17, 18, 19, 20 or 21 days. In some embodiments, a method of expansion as described herein comprises culturing, e.g., expanding, the cells for at least about 1 week, 2 weeks, 3 weeks, 4 weeks, 5 weeks, 6 weeks, 7 weeks or 8 weeks.

[1017] In some embodiments, a method of expansion as described herein is performed on immune cells obtained from a healthy subject.

[1018] In some embodiments, a method of expansion as described herein is performed on immune cells (e.g., TILs) obtained from a subject having a disease, e.g., a cancer, e.g., a solid tumor as described herein.

[1019] In some embodiments, a method of expansion as described herein further comprises contacting the population of cells with an agent, that promotes, e.g., increases, immune cell expansion. In some embodiments, the agent comprises an immune checkpoint inhibitor, e.g., a PD-1 inhibitor, a LAG-3 inhibitor, a CTLA4 inhibitor, or a TIM-3 inhibitor. In some embodiments, the agent comprises a 4-1BB agonist, e.g., an anti-4-1BB antibody.

[1020] Without wishing to be bound by theory, in some embodiments, the multifunctional polypeptide molecule as described herein can expand, e.g., selectively or preferentially expand, T cells expressing a T cell receptor (TCR) comprising a TCR alpha and/or TCR beta molecule, e.g., TCR alpha-beta T cells (αβ T cells). In some embodiments, the multifunctional polypeptide molecule as described herein does not expand, or induce proliferation of T cells expressing a TCR comprising a TCR gamma and/or TCR delta molecule, e.g., TCR gamma-delta T cells (γδ T cells). In some embodiments, the multifunctional polypeptide molecule as described herein selectively or preferentially expands αβ T cells over γδ T cells.

[1021] Without wishing to be bound by theory, in some embodiments, γδ T cells are associated with cytokine release syndrome (CRS) and/or neurotoxicity (NT). In some embodiments, the multispecific or multifunctional molecules as described herein result in selective expansion of non-γδ T cells, e.g., expansion of αβ T cells, thus reducing CRS and/or NT.

[1022] In some embodiments, any of the compositions or methods as described herein result in an immune cell population having a reduction of, e.g., depletion of, γδ T cells. In some embodiments, the immune cell population is contacted with an agent that reduces, e.g., inhibits or depletes, γδ T cells, e.g., an anti-IL-17 antibody or an agent that binds to a TCR gamma and/or TCR delta molecule.

[1023] In some embodiments, the multifunctional polypeptide molecule as described herein results in expansion of an immune cell, e.g., a T cell, a tumor infiltrating lymphocyte (TIL), an NK cell, or other immune cells (e.g., as described herein).

[1024] In some embodiments, binding of the multifunctional polypeptide molecule as described herein to a TCRβV region results in one, two, three or all of: (i) reduced T cell proliferation kinetics; (ii) cell killing, e.g., target cell killing, e.g. cancer cell killing, e.g., as measured by an assay of Example 4; (iii) increased Natural Killer (NK) cell proliferation, e.g., expansion; or (iv) expansion, e.g., at least about 1.1-10 expansion (e.g., at least about 1.1, 1.2, 1.3, 1.4, 1.5, 2, 3, 4, 5, 6, 7, 8, 9, or 10 fold expansion), of a population of T cells having a memory-like phenotype, e.g., as described herein, e.g., wherein (i)-(iv) are relative to the non-TCRβV-binding T cell engager.

[1025] In some embodiments, the method further comprises contacting the population of cells with an agent that promotes, e.g., increases, immune cell expansion. In some embodiments, the agent includes an immune checkpoint inhibitor, e.g., as described herein. In some embodiments, the agent includes a 4-1BB (CD127) agonist, e.g., an anti-4-1BB antibody.

[1026] In some embodiments, the method further comprises comprising contacting the population of cells with a non-dividing population of cells, e.g., feeder cells, e.g., irradiated allogenic human PBMCs.

[1027] In some embodiments, expansion of the population of immune cells, is compared to expansion of a similar population of cells with an antibody that binds to: a CD3 molecule, e.g., CD3 epsilon (CD3e) molecule; or a TCR alpha (TCRα) molecule.

[1028] In some embodiments, expansion of the population of immune cells, is compared to expansion of a similar population of cells not contacted with the anti-TCRβV antibody molecule or the multispecific or multifunctional molecules as described herein.

[1029] In some embodiments, expansion of the population of memory effector T cells, e.g., TEM cells, e.g., TEMRA cells, is compared to expansion of a similar population of cells with an antibody that binds to: a CD3 molecule, e.g., CD3 epsilon (CD3e) molecule; or a TCR alpha (TCRα) molecule.

[1030] In some embodiments, the method results in expansion of, e.g., selective or preferential expansion of, T cells expressing a T cell receptor (TCR) comprising a TCR alpha and/or TCR beta molecule, e.g., TCR alpha-beta T cells (αβ T cells).

[1031] In some embodiments, the method results in expansion of αβT cells over expansion of T cells expressing a TCR comprising a TCR gamma and/or TCR delta molecule, e.g., TCR gamma-delta T cells (γδ T cells). In some embodiments, expansion of αβT cells over γδ T cells results in reduced production of cytokines associated with CRS. In some embodiments, expansion of αβT cells over γδ T cells results in immune cells that have reduced capacity to, e.g., are less prone to, induce CRS upon administration into a subject.

[1032] In some embodiments, an immune cell population (e.g., T cells (e.g., TEMRA cells or TILs) or NK cells) cultured in the presence of, e.g., expanded with, the multifunctional polypeptide molecule as described herein does not induce CRS and/or NT when administered into a subject, e.g., a subject having a disease or condition as described herein.

[1033] In some embodiments, provided herein is a multifunctional polypeptide molecule as described herein comprising a non-murine, e.g., a human-like antibody molecule (e.g., a human or humanized antibody molecule), which binds, e.g., specifically binds, to a T cell receptor beta variable (TCRβV) region. In some embodiments, binding of the multifunctional polypeptide molecule as described herein results in expansion, e.g., at least about 1.1-50 fold expansion (e.g., at least about 1.5-40 fold, 2-35 fold, 3-30 fold, 5-25 fold, 8-20 fold, or 10-15 fold expansion), of a population of T cells, e.g., a population of T cells having a memory-like phenotype, e.g., CD45RA+ CCR7− T cells. In some embodiments, the population of T cells having a memory-like phenotype comprises CD4+ and/or CD8+ T cells. In some embodiments, the population of T cells having a memory-like phenotype comprises a population of memory T cells, e.g., T effector memory (TEM) cells, e.g., TEM cells expressing CD45RA (TEMRA) cells, e.g., CD4+ or CD8+ TEMRA cells. In some embodiments, the population of T cells having a memory-like phenotype does not express a senescent marker, e.g., CD57. In some embodiments, the population of T cells having a memory-like phenotype does not express an inhibitory receptor, e.g., OX40, 4-1BB, and/or ICOS.

[1034] In some embodiments, the population of T cells having a memory-like phenotype is a population of T cells with CD45RA+ CCR7− CD57−. In some embodiments, the population of T cells having a memory-like phenotype does not express an inhibitory receptor, e.g., OX40, 4-1BB, and/or ICOS.

[1035] In some embodiments, the population of T cells having a memory-like phenotype, e.g., as described herein, has increased proliferative capacity, e.g., as compared to a reference cell population, e.g., an otherwise similar population of cells that has not been contacted with an anti-TCRβV antibody or the multispecific or multifunctional molecules as described herein.

[1036] In some embodiments, the expansion is at least about 1.1-10 fold expansion (e.g., at least about 1.1, 1.2, 1.3, 1.4, 1.5, 2, 3, 4, 5, 6, 7, 8, 9, or 10 fold expansion).

[1037] In some embodiments, expansion of the population of T cells having a memory-like phenotype, e.g., memory effector T cells, e.g., TEM cells, e.g., TEMRA cells, e.g., CD4+ or CD8+ TEMRA cells, is compared to expansion of a similar population of cells with an antibody that binds to: a CD3 molecule, e.g., CD3 epsilon (CD3e) molecule; or a TCR alpha (TCRα) molecule.

[1038] In some embodiments, the population of expanded T cells having a memory-like phenotype, e.g., T effector memory cells, comprises cells T cells, e.g., CD3+, CD8+ or CD4+ T cells. In some embodiments, the population of expanded T cells having a memory-like phenotype, T effector memory cells, comprises CD3+ and CD8+ T cells. In some embodiments, the population of expanded T cells having a memory-like phenotype, e.g., T effector memory cells comprises CD3+ and CD4+ T cells.

[1039] In some embodiments, the population of expanded T cells having a memory-like phenotype, T effector memory (TEM) cells, comprises cells T cells, e.g., CD3+, CD8+ or CD4+ T cells, which express or re-express, CD45RA, e.g., CD45RA+. In some embodiments, the population comprises TEM cells expressing CD45RA, e.g., TEMRA cells. In some embodiments, expression of CD45RA on TEMRA cells, e.g., CD4+ or CD8+ TEMRA cells, can be detected by a method as described herein, e.g., flow cytometry.

[1040] In some embodiments, the population of T cells having a memory-like phenotype, e.g., TEMRA cells have low or no expression of CCR7, e.g., CCR7− or CCR7 low. In some embodiments, expression of CCR7 on TEMRA cells cannot be detected by a method as described herein, e.g., flow cytometry.

[1041] In some embodiments, the population of T cells having a memory-like phenotype, e.g., TEMRA cells express CD95, e.g., CD95+. In some embodiments, expression of CD95 on TEMRA cells can be detected by a method as described herein, e.g., flow cytometry.

[1042] In some embodiments, the population of T cells having a memory-like phenotype, e.g., TEMRA cells express CD45RA, e.g., CD45RA+, have low or no expression of CCR7, e.g., CCR7− or CCR7 low, and express CD95, e.g., CD95+. In some embodiments, the population of T cells having a memory-like phenotype, e.g., TEMRA cells can be identified as CD45RA+, CCR7− and CD95+ cells. In some embodiments, the population of T cells having a memory-like phenotype, e.g., TEMRA cells comprise CD3+, CD4+ or CD8+ T cells (e.g., CD3+ T cells, CD3+CD8+ T cells, or CD3+CD4+ T cells).

[1043] In some embodiments, the population of T cells having a memory-like phenotype does not express a senescent marker, e.g., CD57.

[1044] In some embodiments, the population of T cells having a memory-like phenotype does not express an inhibitory receptor, e.g., OX40, 4-1BB, and/or ICOS.

[1045] In some embodiments, binding of the multifunctional polypeptide molecule as described herein results in expansion, e.g., at least about 1.1-50 fold expansion (e.g., at least about 1.5-40 fold, 2-35 fold, 3-30 fold, 5-25 fold, 8-20 fold, or 10-15 fold expansion), of a subpopulation of T cells. In some embodiments, the multifunctional polypeptide molecule as described herein-activated (e.g., expanded) subpopulation of T cells resemble TEMRA cells in high expression of CD45RA and/or low expression of CCR7. In some embodiments, the multifunctional polypeptide molecule as described herein-activated (e.g., expanded) subpopulation of T cells do not display upregulation of the senescence markers CD57 and/or KLRG1. In some embodiments, the multifunctional polypeptide molecule as described herein-activated (e.g., expanded) subpopulation of T cells do not display upregulation of co-stimulatory molecules CD27 and/or CD28. In some embodiments, the multifunctional polypeptide molecule as described herein-activated (e.g., expanded) subpopulation of T cells are highly proliferative. In some embodiments, the multifunctional polypeptide molecule as described herein-activated (e.g., expanded) subpopulation of T cells secrete IL-2. In some embodiments, expression of surface markers on T cells can be detected by a method as described herein, e.g., flow cytometry. In some embodiments, the proliferative capability of T cells can be detected by a method as described herein, e.g., a method described in Example 4. In some embodiments, cytokine expression of T cells can be detected by a method as described herein, e.g., a method described in Examples 10 and 35. In some embodiments, the expansion is at least about 1.1-10 fold expansion (e.g., at least about 1.1, 1.2, 1.3, 1.4, 1.5, 2, 3, 4, 5, 6, 7, 8, 9, or 10 fold expansion). In some embodiments, the expansion is compared to expansion of a similar population of cells with an antibody that binds to a CD3 molecule, e.g., CD3 epsilon (CD3e) molecule; or a TCR alpha (TCRα) molecule.

[1046] In some embodiments, binding of the multifunctional polypeptide molecule as described herein results in proliferation, e.g., expansion, e.g., at least about 1.1-50 fold expansion (e.g., at least about 1.5-40 fold, 2-35 fold, 3-30 fold, 5-25 fold, 8-20 fold, or 10-15 fold expansion), of a population of Natural Killer (NK) cells. In some embodiments, the expansion of NK cells is at least about 1.1-30 fold expansion (e.g., at least about 1.1, 1.2, 1.3, 1.4, 1.5, 2, 3, 4, 5, 6, 7, 8, 9, 10, 15, 20, 25, or at least about 1.1-5, 5-10, 10-15, 15-20, 20-25, or 25-30 fold expansion). In some embodiments, the expansion of NK cells is measure by an assay of Example 4. In some embodiments, the expansion of NK cells by, e.g., binding of, the multifunctional polypeptide molecule as described herein is compared to expansion of an otherwise similar population not contacted with the multifunctional polypeptide molecule as described herein.

[1047] In some embodiments, binding of the multifunctional polypeptide molecule as described herein results in cell killing, e.g., target cell killing, e.g. cancer cell killing. In some embodiments, the cancer cell is a hematological cancer cell or a solid tumor cell. In some embodiments, the cancer cell is a multiple myeloma cell. In some embodiments, binding of the multifunctional polypeptide molecule as described herein results in cell killing in vitro or in vivo. In some embodiments, cell killing is measured by an assay of Example 4.

[1048] In some embodiments, binding of the multifunctional polypeptide molecule as described herein to a TCRβV region results in an increase or decrease of at least 2, 5, 10, 20, 50, 100, 200, 300, 400, 500, 600, 700, 800, 900, 1000, or 2000 fold, or at least 2-2000 fold (e.g., 5-1000, 10-900, 20-800, 50-700, 100-600, 200-500, or 300-400 fold) of any of the activities described herein compared the activity of 16G8 or TM23 murine antibody, or a humanized version thereof as described in U.S. Pat. No. 5,861,155.

[1049] In some embodiments, the method comprises expanding, e.g., increasing the number of, an immune cell population in the subject. In some embodiments, provided herein is a method of expanding, e.g., increasing the number of, an immune cell population comprising, contacting the immune cell population with an effective amount of the multifunctional polypeptide molecule as described herein. In some embodiments, the expansion occurs in vivo or ex vivo (e.g., in vitro).

[1050] In some embodiments, provided herein is a method of expanding, e.g., increasing the number of, an immune cell population comprising, contacting the immune cell population with a multifunctional polypeptide molecule as described herein comprising an antibody molecule, e.g., humanized antibody molecule, which binds, e.g., specifically binds, to a T cell receptor beta variable chain (TCRβV) region (e.g., anti-TCRβV antibody molecule), thereby expanding the immune cell population. In some embodiments, the expansion occurs in vivo or ex vivo (e.g., in vitro).

[1051] In some embodiments, provided herein is a method of expanding a population of immune effector cells from a subject having a cancer, the method comprising: (i) isolating a biological sample comprising a population of immune effector cells from the subject; e.g., a peripheral blood sample, biopsy sample, or bone marrow sample; (ii) acquiring a value of the status of one or more TCRβV molecules for the subject, e.g., in the biological sample from the subject, wherein said value comprises a measure of the presence of, e.g., level or activity of, a TCRβV molecule in a sample from the subject compared to a reference value, e.g., a sample from a health subject, wherein a value that is higher, e.g., increased, in the subject relative to the reference, e.g., healthy subject, is indicative of the presence of cancer in the subject, and (iii) contacting the biological sample comprising a population of immune effector cells with the multifunctional polypeptide molecule as described herein.

[1052] In some embodiments, the method further comprises administering the population of immune effector cells contacted with the multifunctional polypeptide molecule as described herein to the subject.

[1053] In some embodiments, a higher, e.g., increased, level or activity of one or more TCRβV molecules in a subject, e.g., in a sample from a subject, is indicative of a bias, e.g., a preferential expansion, e.g., clonal expansion, of T cells expressing said one or more TCRβV molecules in the subject.

[1054] Accordingly, provided herein are, inter alia, multispecific or multifunctional molecules comprising TCRβV-binding moieties as described herein (e.g., multispecific or multifunctional antibody molecules) that comprise anti-TCRβV antibody molecules, nucleic acids encoding the same, methods of producing the aforesaid molecules, pharmaceutical compositions comprising aforesaid molecules, and methods of treating a disease or disorder, e.g., cancer, using the aforesaid molecules. The antibody molecules and pharmaceutical compositions as described herein can be used (alone or in combination with other agents or therapeutic modalities) to treat, prevent and/or diagnose disorders and conditions, e.g., cancer, e.g., as described herein.

### Exemplary Multifunctional Polypeptide Molecule

[1055] Any of the compositions and methods described herein can be used to expand an immune cell population. An immune cell provided herein includes an immune cell derived from a hematopoietic stem cell or an immune cell derived from a non-hematopoietic stem cell, e.g., by differentiation or de-differentiation.

[1056] In some embodiments, the multifunctional polypeptide molecule comprises: (i) a first polypeptide comprising a sequence having at least 50%, 55%, 60%, 65%, 70%, 75%, 80%, 85%, 90%, 95%, 97%, 98%, 99%, 99.5%, 99.6%, 99.7%, 99.8%, or 99.9% sequence identity to the sequence of SEQ ID NO: 1346, and a sequence having at least 50%, 55%, 60%, 65%, 70%, 75%, 80%, 85%, 90%, 95%, 97%, 98%, 99%, 99.5%, 99.6%, 99.7%, 99.8%, or 99.9% sequence identity to the sequence of SEQ ID NO: 3649; (ii) a second polypeptide comprising a sequence having at least 50%, 55%, 60%, 65%, 70%, 75%, 80%, 85%, 90%, 95%, 97%, 98%, 99%, 99.5%, 99.6%, 99.7%, 99.8%, or 99.9% sequence identity to the sequence of SEQ ID NO: 3523, a sequence having at least 50%, 55%, 60%, 65%, 70%, 75%, 80%, 85%, 90%, 95%, 97%, 98%, 99%, 99.5%, 99.6%, 99.7%, 99.8%, or 99.9% sequence identity to the sequence of SEQ ID NO: 2170, and a sequence having at least 50%, 55%, 60%, 65%, 70%, 75%, 80%, 85%, 90%, 95%, 97%, 98%, 99%, 99.5%, 99.6%, 99.7%, 99.8%, or 99.9% sequence identity to the sequence of SEQ ID NO: 3648; and (iii) a third polypeptide comprising a sequence having at least 50%, 55%, 60%, 65%, 70%, 75%, 80%, 85%, 90%, 95%, 97%, 98%, 99%, 99.5%, 99.6%, 99.7%, 99.8%, or 99.9% sequence identity to the sequence of SEQ ID NO: 1349, and a sequence having at least 50%, 55%, 60%, 65%, 70%, 75%, 80%, 85%, 90%, 95%, 97%, 98%, 99%, 99.5%, 99.6%, 99.7%, 99.8%, or 99.9% sequence identity to the sequence of SEQ ID NO: 3644.

[1057] In some embodiments, the multifunctional polypeptide molecule comprises: (i) a first polypeptide comprising the sequence of SEQ ID NO: 1346, and the sequence of SEQ ID NO: 3649; (ii) a second polypeptide comprising the sequence of SEQ ID NO: 3523, the sequence of SEQ ID NO: 2170, and the sequence of SEQ ID NO: 3648; and (iii) a third polypeptide comprising the sequence of SEQ ID NO: 1349, and the sequence of SEQ ID NO: 3644.

[1058] In some embodiments, the multifunctional polypeptide molecule comprises: (i) a first polypeptide comprising, from the N-terminus to the C-terminus, a sequence having at least 50%, 55%, 60%, 65%, 70%, 75%, 80%, 85%, 90%, 95%, 97%, 98%, 99%, 99.5%, 99.6%, 99.7%, 99.8%, or 99.9% sequence identity to the sequence of SEQ ID NO: 1346 operatively linked to a sequence having at least 50%, 55%, 60%, 65%, 70%, 75%, 80%, 85%, 90%, 95%, 97%, 98%, 99%, 99.5%, 99.6%, 99.7%, 99.8%, or 99.9% sequence identity to the sequence of SEQ ID NO: 3649; (ii) a second polypeptide comprising, from the N-terminus to the C-terminus, a sequence having at least 50%, 55%, 60%, 65%, 70%, 75%, 80%, 85%, 90%, 95%, 97%, 98%, 99%, 99.5%, 99.6%, 99.7%, 99.8%, or 99.9% sequence identity to the sequence of SEQ ID NO: 3523 operatively linked to a sequence having at least 50%, 55%, 60%, 65%, 70%, 75%, 80%, 85%, 90%, 95%, 97%, 98%, 99%, 99.5%, 99.6%, 99.7%, 99.8%, or 99.9% sequence identity to the sequence of SEQ ID NO: 2170 operatively linked to a sequence having at least 50%, 55%, 60%, 65%, 70%, 75%, 80%, 85%, 90%, 95%, 97%, 98%, 99%, 99.5%, 99.6%, 99.7%, 99.8%, or 99.9% sequence identity to the sequence of SEQ ID NO: 3648; and (iii) a third polypeptide comprising, from the N-terminus to the C-terminus, a sequence having at least 50%, 55%, 60%, 65%, 70%, 75%, 80%, 85%, 90%, 95%, 97%, 98%, 99%, 99.5%, 99.6%, 99.7%, 99.8%, or 99.9% sequence identity to the sequence of SEQ ID NO: 1349 operatively linked to a sequence having at least 50%, 55%, 60%, 65%, 70%, 75%, 80%, 85%, 90%, 95%, 97%, 98%, 99%, 99.5%, 99.6%, 99.7%, 99.8%, or 99.9% sequence identity to the sequence of SEQ ID NO: 3644.

[1059] In some embodiments, the multifunctional polypeptide molecule comprises: (i) a first polypeptide comprising, from the N-terminus to the C-terminus, the sequence of SEQ ID NO: 1346 operatively linked to the sequence of SEQ ID NO: 3649; (ii) a second polypeptide comprising, from the N-terminus to the C-terminus, the sequence of SEQ ID NO: 3523 operatively linked to the sequence of SEQ ID NO: 2170 operatively linked to the sequence of SEQ ID NO: 3648; and (iii) a third polypeptide comprising, from the N-terminus to the C-terminus, the sequence of SEQ ID NO: 1349 operatively linked to the sequence of SEQ ID NO: 3644.

[1060] In some embodiments, a sequence having at least 50%, 55%, 60%, 65%, 70%, 75%, 80%, 85%, 90%, 95%, 97%, 98%, 99%, 99.5%, 99.6%, 99.7%, 99.8%, or 99.9% sequence identity to the sequence of SEQ ID NO: 3523 is operatively linked to a sequence having at least 50%, 55%, 60%, 65%, 70%, 75%, 80%, 85%, 90%, 95%, 97%, 98%, 99%, 99.5%, 99.6%, 99.7%, 99.8%, or 99.9% sequence identity to the sequence of SEQ ID NO: 2170 via a sequence having at least 50%, 55%, 60%, 65%, 70%, 75%, 80%, 85%, 90%, 95%, 97%, 98%, 99%, 99.5%, 99.6%, 99.7%, 99.8%, or 99.9% sequence identity to the sequence of SEQ ID NO: 3524, a sequence having at least 50%, 55%, 60%, 65%, 70%, 75%, 80%, 85%, 90%, 95%, 97%, 98%, 99%, 99.5%, 99.6%, 99.7%, 99.8%, or 99.9% sequence identity to the sequence of SEQ ID NO: 2170 is operatively linked to a sequence having at least 50%, 55%, 60%, 65%, 70%, 75%, 80%, 85%, 90%, 95%, 97%, 98%, 99%, 99.5%, 99.6%, 99.7%, 99.8%, or 99.9% sequence identity to the sequence of SEQ ID NO: 3648 via a sequence having at least 50%, 55%, 60%, 65%, 70%, 75%, 80%, 85%, 90%, 95%, 97%, 98%, 99%, 99.5%, 99.6%, 99.7%, 99.8%, or 99.9% sequence identity to the sequence of SEQ ID NO: 3308, or a combination thereof.

[1061] In some embodiments, the sequence of SEQ ID NO: 3523 is operatively linked to the sequence of SEQ ID NO: 2170 via the sequence of SEQ ID NO: 3524, the sequence of SEQ ID NO: 2170 is operatively linked to the sequence of SEQ ID NO: 3648 via the sequence of SEQ ID NO: 3308, or a combination thereof.

[1062] In some embodiments, the multifunctional polypeptide molecule comprises: (i) a first polypeptide comprising a sequence having at least 50%, 55%, 60%, 65%, 70%, 75%, 80%, 85%, 90%, 95%, 97%, 98%, 99%, 99.5%, 99.6%, 99.7%, 99.8%, or 99.9% sequence identity to the sequence of SEQ ID NO: 3517; (ii) a second polypeptide comprising a sequence having at least 50%, 55%, 60%, 65%, 70%, 75%, 80%, 85%, 90%, 95%, 97%, 98%, 99%, 99.5%, 99.6%, 99.7%, 99.8%, or 99.9% sequence identity to the sequence of SEQ ID NO: 3519; and (iii) a third polypeptide comprising a sequence having at least 50%, 55%, 60%, 65%, 70%, 75%, 80%, 85%, 90%, 95%, 97%, 98%, 99%, 99.5%, 99.6%, 99.7%, 99.8%, or 99.9% sequence identity to the sequence of SEQ ID NO: 3518.

[1063] In some embodiments, the multifunctional polypeptide molecule comprises: (i) a first polypeptide comprising the sequence of SEQ ID NO: 3517; (ii) a second polypeptide comprising the sequence of SEQ ID NO: 3519; and (iii) a third polypeptide comprising to the sequence of SEQ ID NO: 3518.

[1064] In some embodiments, the multifunctional polypeptide molecule comprises: (i) a first polypeptide comprising a sequence having at least 50%, 55%, 60%, 65%, 70%, 75%, 80%, 85%, 90%, 95%, 97%, 98%, 99%, 99.5%, 99.6%, 99.7%, 99.8%, or 99.9% sequence identity to the sequence of SEQ ID NO: 1346, and a sequence having at least 50%, 55%, 60%, 65%, 70%, 75%, 80%, 85%, 90%, 95%, 97%, 98%, 99%, 99.5%, 99.6%, 99.7%, 99.8%, or 99.9% sequence identity to the sequence of SEQ ID NO: 3649; (ii) a second polypeptide comprising a sequence having at least 50%, 55%, 60%, 65%, 70%, 75%, 80%, 85%, 90%, 95%, 97%, 98%, 99%, 99.5%, 99.6%, 99.7%, 99.8%, or 99.9% sequence identity to the sequence of SEQ ID NO: 2170, and a sequence having at least 50%, 55%, 60%, 65%, 70%, 75%, 80%, 85%, 90%, 95%, 97%, 98%, 99%, 99.5%, 99.6%, 99.7%, 99.8%, or 99.9% sequence identity to the sequence of SEQ ID NO: 3648; and (iii) a third polypeptide comprising a sequence having at least 50%, 55%, 60%, 65%, 70%, 75%, 80%, 85%, 90%, 95%, 97%, 98%, 99%, 99.5%, 99.6%, 99.7%, 99.8%, or 99.9% sequence identity to the sequence of SEQ ID NO: 1349, and a sequence having at least 50%, 55%, 60%, 65%, 70%, 75%, 80%, 85%, 90%, 95%, 97%, 98%, 99%, 99.5%, 99.6%, 99.7%, 99.8%, or 99.9% sequence identity to the sequence of SEQ ID NO: 3644.

[1065] In some embodiments, the multifunctional polypeptide molecule comprises: (i) a first polypeptide comprising the sequence of SEQ ID NO: 1346, and the sequence of SEQ ID NO: 3649; (ii) a second polypeptide comprising the sequence of SEQ ID NO: 2170, and the sequence of SEQ ID NO: 3648; and (iii) a third polypeptide comprising the sequence of SEQ ID NO: 1349, and the sequence of SEQ ID NO: 3644.

[1066] In some embodiments, the multifunctional polypeptide molecule comprises: (i) a first polypeptide comprising, from the N-terminus to the C-terminus, a sequence having at least 50%, 55%, 60%, 65%, 70%, 75%, 80%, 85%, 90%, 95%, 97%, 98%, 99%, 99.5%, 99.6%, 99.7%, 99.8%, or 99.9% sequence identity to the sequence of SEQ ID NO: 1346 operatively linked to a sequence having at least 50%, 55%, 60%, 65%, 70%, 75%, 80%, 85%, 90%, 95%, 97%, 98%, 99%, 99.5%, 99.6%, 99.7%, 99.8%, or 99.9% sequence identity to the sequence of SEQ ID NO: 3649; (ii) a second polypeptide comprising, from the N-terminus to the C-terminus, a sequence having at least 50%, 55%, 60%, 65%, 70%, 75%, 80%, 85%, 90%, 95%, 97%, 98%, 99%, 99.5%, 99.6%, 99.7%, 99.8%, or 99.9% sequence identity to the sequence of SEQ ID NO: 2170 operatively linked to a sequence having at least 50%, 55%, 60%, 65%, 70%, 75%, 80%, 85%, 90%, 95%, 97%, 98%, 99%, 99.5%, 99.6%, 99.7%, 99.8%, or 99.9% sequence identity to the sequence of SEQ ID NO: 3648; and (iii) a third polypeptide comprising, from the N-terminus to the C-terminus, a sequence having at least 50%, 55%, 60%, 65%, 70%, 75%, 80%, 85%, 90%, 95%, 97%, 98%, 99%, 99.5%, 99.6%, 99.7%, 99.8%, or 99.9% sequence identity to the sequence of SEQ ID NO: 1349 operatively linked to a sequence having at least 50%, 55%, 60%, 65%, 70%, 75%, 80%, 85%, 90%, 95%, 97%, 98%, 99%, 99.5%, 99.6%, 99.7%, 99.8%, or 99.9% sequence identity to the sequence of SEQ ID NO: 3644.

[1067] In some embodiments, the multifunctional polypeptide molecule comprises: (i) a first polypeptide comprising, from the N-terminus to the C-terminus, the sequence of SEQ ID NO: 1346 operatively linked to the sequence of SEQ ID NO: 3649; (ii) a second polypeptide comprising, from the N-terminus to the C-terminus, the sequence of SEQ ID NO: 2170 operatively linked to the sequence of SEQ ID NO: 3648; and (iii) a third polypeptide comprising, from the N-terminus to the C-terminus, the sequence of SEQ ID NO: 1349 operatively linked to the sequence of SEQ ID NO: 3644.

[1068] In some embodiments, a sequence having at least 50%, 55%, 60%, 65%, 70%, 75%, 80%, 85%, 90%, 95%, 97%, 98%, 99%, 99.5%, 99.6%, 99.7%, 99.8%, or 99.9% sequence identity to the sequence of SEQ ID NO: 2170 is operatively linked to a sequence having at least 50%, 55%, 60%, 65%, 70%, 75%, 80%, 85%, 90%, 95%, 97%, 98%, 99%, 99.5%, 99.6%, 99.7%, 99.8%, or 99.9% sequence identity to the sequence of SEQ ID NO: 3648 via a sequence having at least 50%, 55%, 60%, 65%, 70%, 75%, 80%, 85%, 90%, 95%, 97%, 98%, 99%, 99.5%, 99.6%, 99.7%, 99.8%, or 99.9% sequence identity to the sequence of SEQ ID NO: 3308, or a combination thereof.

[1069] In some embodiments, the sequence of SEQ ID NO: 2170 is operatively linked to the sequence of SEQ ID NO: 3648 via the sequence of SEQ ID NO: 3308, or a combination thereof.

[1070] In some embodiments, the multifunctional polypeptide molecule comprises: (i) a first polypeptide comprising a sequence having at least 50%, 55%, 60%, 65%, 70%, 75%, 80%, 85%, 90%, 95%, 97%, 98%, 99%, 99.5%, 99.6%, 99.7%, 99.8%, or 99.9% sequence identity to the sequence of SEQ ID NO: 3517; (ii) a second polypeptide comprising a sequence having at least 50%, 55%, 60%, 65%, 70%, 75%, 80%, 85%, 90%, 95%, 97%, 98%, 99%, 99.5%, 99.6%, 99.7%, 99.8%, or 99.9% sequence identity to the sequence of SEQ ID NO: 3520; and (iii) a third polypeptide comprising a sequence having at least 50%, 55%, 60%, 65%, 70%, 75%, 80%, 85%, 90%, 95%, 97%, 98%, 99%, 99.5%, 99.6%, 99.7%, 99.8%, or 99.9% sequence identity to the sequence of SEQ ID NO: 3518.

[1071] In some embodiments, the multifunctional polypeptide molecule comprises: (i) a first polypeptide comprising the sequence of SEQ ID NO: 3517; (ii) a second polypeptide comprising the sequence of SEQ ID NO: 3520; and (iii) a third polypeptide comprising to the sequence of SEQ ID NO: 3518.

[1072] In some embodiments, the IL-2 molecule or a functional fragment or a functional variant thereof or the IL-2 C125A mutant molecule or a functional fragment or a functional variant thereof is operatively linked to the immunoglobulin heavy chain constant region via a linker.

[1073] In some embodiments, the multifunctional polypeptide molecule comprises: (i) a first polypeptide comprising a sequence having at least 50%, 55%, 60%, 65%, 70%, 75%, 80%, 85%, 90%, 95%, 97%, 98%, 99%, 99.5%, 99.6%, 99.7%, 99.8%, or 99.9% sequence identity to the sequence of SEQ ID NO: 1346, and a sequence having at least 50%, 55%, 60%, 65%, 70%, 75%, 80%, 85%, 90%, 95%, 97%, 98%, 99%, 99.5%, 99.6%, 99.7%, 99.8%, or 99.9% sequence identity to the sequence of SEQ ID NO: 3649; (ii) a second polypeptide comprising a sequence having at least 50%, 55%, 60%, 65%, 70%, 75%, 80%, 85%, 90%, 95%, 97%, 98%, 99%, 99.5%, 99.6%, 99.7%, 99.8%, or 99.9% sequence identity to the sequence of SEQ ID NO: 2270, and a sequence having at least 50%, 55%, 60%, 65%, 70%, 75%, 80%, 85%, 90%, 95%, 97%, 98%, 99%, 99.5%, 99.6%, 99.7%, 99.8%, or 99.9% sequence identity to the sequence of SEQ ID NO: 3648; and (iii) a third polypeptide comprising a sequence having at least 50%, 55%, 60%, 65%, 70%, 75%, 80%, 85%, 90%, 95%, 97%, 98%, 99%, 99.5%, 99.6%, 99.7%, 99.8%, or 99.9% sequence identity to the sequence of SEQ ID NO: 1349, and a sequence having at least 50%, 55%, 60%, 65%, 70%, 75%, 80%, 85%, 90%, 95%, 97%, 98%, 99%, 99.5%, 99.6%, 99.7%, 99.8%, or 99.9% sequence identity to the sequence of SEQ ID NO: 3644.

[1074] In some embodiments, the IL-2 molecule or a functional fragment or a functional variant thereof or the IL-2 C125A mutant molecule or a functional fragment or a functional variant thereof is operatively linked to the immunoglobulin heavy chain constant region via a linker.

[1075] In some embodiments, the multifunctional polypeptide molecule comprises: (i) a first polypeptide comprising the sequence of SEQ ID NO: 1346, and the sequence of SEQ ID NO: 3649; (ii) a second polypeptide comprising the sequence of SEQ ID NO: 2270, and the sequence of SEQ ID NO: 3648; and (iii) a third polypeptide comprising the sequence of SEQ ID NO: 1349, and the sequence of SEQ ID NO: 3644.

[1076] In some embodiments, the multifunctional polypeptide molecule comprises: (i) a first polypeptide comprising, from the N-terminus to the C-terminus, a sequence having at least 50%, 55%, 60%, 65%, 70%, 75%, 80%, 85%, 90%, 95%, 97%, 98%, 99%, 99.5%, 99.6%, 99.7%, 99.8%, or 99.9% sequence identity to the sequence of SEQ ID NO: 1346 operatively linked to a sequence having at least 50%, 55%, 60%, 65%, 70%, 75%, 80%, 85%, 90%, 95%, 97%, 98%, 99%, 99.5%, 99.6%, 99.7%, 99.8%, or 99.9% sequence identity to the sequence of SEQ ID NO: 3649; (ii) a second polypeptide comprising, from the N-terminus to the C-terminus, a sequence having at least 50%, 55%, 60%, 65%, 70%, 75%, 80%, 85%, 90%, 95%, 97%, 98%, 99%, 99.5%, 99.6%, 99.7%, 99.8%, or 99.9% sequence identity to the sequence of SEQ ID NO: 2270 operatively linked to a sequence having at least 50%, 55%, 60%, 65%, 70%, 75%, 80%, 85%, 90%, 95%, 97%, 98%, 99%, 99.5%, 99.6%, 99.7%, 99.8%, or 99.9% sequence identity to the sequence of SEQ ID NO: 3648; and (iii) a third polypeptide comprising, from the N-terminus to the C-terminus, a sequence having at least 50%, 55%, 60%, 65%, 70%, 75%, 80%, 85%, 90%, 95%, 97%, 98%, 99%, 99.5%, 99.6%, 99.7%, 99.8%, or 99.9% sequence identity to the sequence of SEQ ID NO: 1349 operatively linked to a sequence having at least 50%, 55%, 60%, 65%, 70%, 75%, 80%, 85%, 90%, 95%, 97%, 98%, 99%, 99.5%, 99.6%, 99.7%, 99.8%, or 99.9% sequence identity to the sequence of SEQ ID NO: 3644.

[1077] In some embodiments, the multifunctional polypeptide molecule comprises: (i) a first polypeptide comprising, from the N-terminus to the C-terminus, the sequence of SEQ ID NO: 1346 operatively linked to the sequence of SEQ ID NO: 3649; (ii) a second polypeptide comprising, from the N-terminus to the C-terminus, the sequence of SEQ ID NO: 2270 operatively linked to the sequence of SEQ ID NO: 3648; and (iii) a third polypeptide comprising, from the N-terminus to the C-terminus, the sequence of SEQ ID NO: 1349 operatively linked to the sequence of SEQ ID NO: 3644.

[1078] In some embodiments, a sequence having at least 50%, 55%, 60%, 65%, 70%, 75%, 80%, 85%, 90%, 95%, 97%, 98%, 99%, 99.5%, 99.6%, 99.7%, 99.8%, or 99.9% sequence identity to the sequence of SEQ ID NO: 2270 is operatively linked to a sequence having at least 50%, 55%, 60%, 65%, 70%, 75%, 80%, 85%, 90%, 95%, 97%, 98%, 99%, 99.5%, 99.6%, 99.7%, 99.8%, or 99.9% sequence identity to the sequence of SEQ ID NO: 3648 via a sequence having at least 50%, 55%, 60%, 65%, 70%, 75%, 80%, 85%, 90%, 95%, 97%, 98%, 99%, 99.5%, 99.6%, 99.7%, 99.8%, or 99.9% sequence identity to the sequence of SEQ ID NO: 3308, or a combination thereof.

[1079] In some embodiments, the sequence of SEQ ID NO: 2270 is operatively linked to the sequence of SEQ ID NO: 3648 via the sequence of SEQ ID NO: 3308, or a combination thereof.

[1080] In some embodiments, the multifunctional polypeptide molecule comprises: (i) a first polypeptide comprising a sequence having at least 50%, 55%, 60%, 65%, 70%, 75%, 80%, 85%, 90%, 95%, 97%, 98%, 99%, 99.5%, 99.6%, 99.7%, 99.8%, or 99.9% sequence identity to the sequence of SEQ ID NO: 3517; (ii) a second polypeptide comprising a sequence having at least 50%, 55%, 60%, 65%, 70%, 75%, 80%, 85%, 90%, 95%, 97%, 98%, 99%, 99.5%, 99.6%, 99.7%, 99.8%, or 99.9% sequence identity to the sequence of SEQ ID NO: 3521; and (iii) a third polypeptide comprising a sequence having at least 50%, 55%, 60%, 65%, 70%, 75%, 80%, 85%, 90%, 95%, 97%, 98%, 99%, 99.5%, 99.6%, 99.7%, 99.8%, or 99.9% sequence identity to the sequence of SEQ ID NO: 3518.

[1081] In some embodiments, the multifunctional polypeptide molecule comprises: (i) a first polypeptide comprising the sequence of SEQ ID NO: 3517; (ii) a second polypeptide comprising the sequence of SEQ ID NO: 3521; and (iii) a third polypeptide comprising to the sequence of SEQ ID NO: 3518.

[1082] In some embodiments, the multifunctional polypeptide molecule comprises: (i) a first polypeptide comprising a sequence having at least 50%, 55%, 60%, 65%, 70%, 75%, 80%, 85%, 90%, 95%, 97%, 98%, 99%, 99.5%, 99.6%, 99.7%, 99.8%, or 99.9% sequence identity to the sequence of SEQ ID NO: 3530, and a sequence having at least 50%, 55%, 60%, 65%, 70%, 75%, 80%, 85%, 90%, 95%, 97%, 98%, 99%, 99.5%, 99.6%, 99.7%, 99.8%, or 99.9% sequence identity to the sequence of SEQ ID NO: 3531; (ii) a second polypeptide comprising a sequence having at least 50%, 55%, 60%, 65%, 70%, 75%, 80%, 85%, 90%, 95%, 97%, 98%, 99%, 99.5%, 99.6%, 99.7%, 99.8%, or 99.9% sequence identity to the sequence of SEQ ID NO: 2191, and a sequence having at least 50%, 55%, 60%, 65%, 70%, 75%, 80%, 85%, 90%, 95%, 97%, 98%, 99%, 99.5%, 99.6%, 99.7%, 99.8%, or 99.9% sequence identity to the sequence of SEQ ID NO: 3533; and (iii) a third polypeptide comprising a sequence having at least 50%, 55%, 60%, 65%, 70%, 75%, 80%, 85%, 90%, 95%, 97%, 98%, 99%, 99.5%, 99.6%, 99.7%, 99.8%, or 99.9% sequence identity to the sequence of SEQ ID NO: 3527, and a sequence having at least 50%, 55%, 60%, 65%, 70%, 75%, 80%, 85%, 90%, 95%, 97%, 98%, 99%, 99.5%, 99.6%, 99.7%, 99.8%, or 99.9% sequence identity to the sequence of SEQ ID NO: 3528.

[1083] In some embodiments, the multifunctional polypeptide molecule comprises: (i) a first polypeptide comprising the sequence of SEQ ID NO: 3530, and the sequence of SEQ ID NO: 3531; (ii) a second polypeptide comprising the sequence of SEQ ID NO: 2191, and the sequence of SEQ ID NO: 3533; and (iii) a third polypeptide comprising the sequence of SEQ ID NO: 3527, and the sequence of SEQ ID NO: 3528.

[1084] In some embodiments, the multifunctional polypeptide molecule comprises: (i) a first polypeptide comprising, from the N-terminus to the C-terminus, a sequence having at least 50%, 55%, 60%, 65%, 70%, 75%, 80%, 85%, 90%, 95%, 97%, 98%, 99%, 99.5%, 99.6%, 99.7%, 99.8%, or 99.9% sequence identity to the sequence of SEQ ID NO: 3530 operatively linked to a sequence having at least 50%, 55%, 60%, 65%, 70%, 75%, 80%, 85%, 90%, 95%, 97%, 98%, 99%, 99.5%, 99.6%, 99.7%, 99.8%, or 99.9% sequence identity to the sequence of SEQ ID NO: 3531; (ii) a second polypeptide comprising, from the N-terminus to the C-terminus, a sequence having at least 50%, 55%, 60%, 65%, 70%, 75%, 80%, 85%, 90%, 95%, 97%, 98%, 99%, 99.5%, 99.6%, 99.7%, 99.8%, or 99.9% sequence identity to the sequence of SEQ ID NO: 2191 operatively linked to a sequence having at least 50%, 55%, 60%, 65%, 70%, 75%, 80%, 85%, 90%, 95%, 97%, 98%, 99%, 99.5%, 99.6%, 99.7%, 99.8%, or 99.9% sequence identity to the sequence of SEQ ID NO: 3533; and (iii) a third polypeptide comprising, from the N-terminus to the C-terminus, a sequence having at least 50%, 55%, 60%, 65%, 70%, 75%, 80%, 85%, 90%, 95%, 97%, 98%, 99%, 99.5%, 99.6%, 99.7%, 99.8%, or 99.9% sequence identity to the sequence of SEQ ID NO: 3527 operatively linked to a sequence having at least 50%, 55%, 60%, 65%, 70%, 75%, 80%, 85%, 90%, 95%, 97%, 98%, 99%, 99.5%, 99.6%, 99.7%, 99.8%, or 99.9% sequence identity to the sequence of SEQ ID NO: 3528.

[1085] In some embodiments, the multifunctional polypeptide molecule comprises: (i) a first polypeptide comprising, from the N-terminus to the C-terminus, the sequence of SEQ ID NO: 3530 operatively linked to the sequence of SEQ ID NO: 3531; (ii) a second polypeptide comprising, from the N-terminus to the C-terminus, the sequence of SEQ ID NO: 2191 operatively linked to the sequence of SEQ ID NO: 3533; and (iii) a third polypeptide comprising, from the N-terminus to the C-terminus, the sequence of SEQ ID NO: 3527 operatively linked to the sequence of SEQ ID NO: 3528.

[1086] In some embodiments, a sequence having at least 50%, 55%, 60%, 65%, 70%, 75%, 80%, 85%, 90%, 95%, 97%, 98%, 99%, 99.5%, 99.6%, 99.7%, 99.8%, or 99.9% sequence identity to the sequence of SEQ ID NO: 2191 is operatively linked to a sequence having at least 50%, 55%, 60%, 65%, 70%, 75%, 80%, 85%, 90%, 95%, 97%, 98%, 99%, 99.5%, 99.6%, 99.7%, 99.8%, or 99.9% sequence identity to the sequence of SEQ ID NO: 3533 via a sequence having at least 50%, 55%, 60%, 65%, 70%, 75%, 80%, 85%, 90%, 95%, 97%, 98%, 99%, 99.5%, 99.6%, 99.7%, 99.8%, or 99.9% sequence identity to the sequence of SEQ ID NO: 3308, or a combination thereof.

[1087] In some embodiments, the sequence of SEQ ID NO: 2191 is operatively linked to the sequence of SEQ ID NO: 3533 via the sequence of SEQ ID NO: 3308, or a combination thereof.

[1088] In some embodiments, the first polypeptide further comprises a sequence having at least 50%, 55%, 60%, 65%, 70%, 75%, 80%, 85%, 90%, 95%, 97%, 98%, 99%, 99.5%, 99.6%, 99.7%, 99.8%, or 99.9% sequence identity to the sequence of SEQ ID NO: 3547 operatively linked to a sequence having at least 50%, 55%, 60%, 65%, 70%, 75%, 80%, 85%, 90%, 95%, 97%, 98%, 99%, 99.5%, 99.6%, 99.7%, 99.8%, or 99.9% sequence identity to the sequence of SEQ ID NO: 3531, the second polypeptide further comprises a sequence having at least 50%, 55%, 60%, 65%, 70%, 75%, 80%, 85%, 90%, 95%, 97%, 98%, 99%, 99.5%, 99.6%, 99.7%, 99.8%, or 99.9% sequence identity to the sequence of SEQ ID NO: 3534 operatively linked to a sequence having at least 50%, 55%, 60%, 65%, 70%, 75%, 80%, 85%, 90%, 95%, 97%, 98%, 99%, 99.5%, 99.6%, 99.7%, 99.8%, or 99.9% sequence identity to the sequence of SEQ ID NO: 3533, or a combination thereof.

[1089] In some embodiments, the first polypeptide further comprises the sequence of SEQ ID NO: 3547 operatively linked to the sequence of SEQ ID NO: 3531, the second polypeptide further comprises the sequence of SEQ ID NO: 3534 operatively linked to the sequence of SEQ ID NO: 3533, or a combination thereof.

[1090] In some embodiments, the multifunctional polypeptide molecule comprises: (i) a first polypeptide comprising a sequence having at least 50%, 55%, 60%, 65%, 70%, 75%, 80%, 85%, 90%, 95%, 97%, 98%, 99%, 99.5%, 99.6%, 99.7%, 99.8%, or 99.9% sequence identity to the sequence of SEQ ID NO: 3529 or the sequence of SEQ ID NO: 3548; (ii) a second polypeptide comprising a sequence having at least 50%, 55%, 60%, 65%, 70%, 75%, 80%, 85%, 90%, 95%, 97%, 98%, 99%, 99.5%, 99.6%, 99.7%, 99.8%, or 99.9% sequence identity to the sequence of SEQ ID NO: 3532 or the sequence of SEQ ID NO: 3549; and (iii) a third polypeptide comprising a sequence having at least 50%, 55%, 60%, 65%, 70%, 75%, 80%, 85%, 90%, 95%, 97%, 98%, 99%, 99.5%, 99.6%, 99.7%, 99.8%, or 99.9% sequence identity to the sequence of SEQ ID NO: 3526.

[1091] In some embodiments, the multifunctional polypeptide molecule comprises: (i) a first polypeptide comprising the sequence of SEQ ID NO: 3529 or the sequence of SEQ ID NO: 3548; (ii) a second polypeptide comprising the sequence of SEQ ID NO: 3532 or the sequence of SEQ ID NO: 3549; and (iii) a third polypeptide comprising to the sequence of SEQ ID NO: 3526.

[1092] In some embodiments, the multifunctional polypeptide molecule comprises: (i) a first polypeptide comprising a sequence having at least 50%, 55%, 60%, 65%, 70%, 75%, 80%, 85%, 90%, 95%, 97%, 98%, 99%, 99.5%, 99.6%, 99.7%, 99.8%, or 99.9% sequence identity to the sequence of SEQ ID NO: 1346, and a sequence having at least 50%, 55%, 60%, 65%, 70%, 75%, 80%, 85%, 90%, 95%, 97%, 98%, 99%, 99.5%, 99.6%, 99.7%, 99.8%, or 99.9% sequence identity to the sequence of SEQ ID NO: 3649; (ii) a second polypeptide comprising a sequence having at least 50%, 55%, 60%, 65%, 70%, 75%, 80%, 85%, 90%, 95%, 97%, 98%, 99%, 99.5%, 99.6%, 99.7%, 99.8%, or 99.9% sequence identity to the sequence of SEQ ID NO: 3540, and a sequence having at least 50%, 55%, 60%, 65%, 70%, 75%, 80%, 85%, 90%, 95%, 97%, 98%, 99%, 99.5%, 99.6%, 99.7%, 99.8%, or 99.9% sequence identity to the sequence of SEQ ID NO: 3648; and (iii) a third polypeptide comprising a sequence having at least 50%, 55%, 60%, 65%, 70%, 75%, 80%, 85%, 90%, 95%, 97%, 98%, 99%, 99.5%, 99.6%, 99.7%, 99.8%, or 99.9% sequence identity to the sequence of SEQ ID NO: 1349, and a sequence having at least 50%, 55%, 60%, 65%, 70%, 75%, 80%, 85%, 90%, 95%, 97%, 98%, 99%, 99.5%, 99.6%, 99.7%, 99.8%, or 99.9% sequence identity to the sequence of SEQ ID NO: 3644.

[1093] In some embodiments, the multifunctional polypeptide molecule comprises: (i) a first polypeptide comprising the sequence of SEQ ID NO: 1346, and the sequence of SEQ ID NO: 3649; (ii) a second polypeptide comprising the sequence of SEQ ID NO: 3540, and the sequence of SEQ ID NO: 3648; and (iii) a third polypeptide comprising the sequence of SEQ ID NO: 1349, and the sequence of SEQ ID NO: 3644.

[1094] In some embodiments, the multifunctional polypeptide molecule comprises: (i) a first polypeptide comprising, from the N-terminus to the C-terminus, a sequence having at least 50%, 55%, 60%, 65%, 70%, 75%, 80%, 85%, 90%, 95%, 97%, 98%, 99%, 99.5%, 99.6%, 99.7%, 99.8%, or 99.9% sequence identity to the sequence of SEQ ID NO: 1346 operatively linked to a sequence having at least 50%, 55%, 60%, 65%, 70%, 75%, 80%, 85%, 90%, 95%, 97%, 98%, 99%, 99.5%, 99.6%, 99.7%, 99.8%, or 99.9% sequence identity to the sequence of SEQ ID NO: 3649; (ii) a second polypeptide comprising, from the N-terminus to the C-terminus, a sequence having at least 50%, 55%, 60%, 65%, 70%, 75%, 80%, 85%, 90%, 95%, 97%, 98%, 99%, 99.5%, 99.6%, 99.7%, 99.8%, or 99.9% sequence identity to the sequence of SEQ ID NO: 3540 operatively linked to a sequence having at least 50%, 55%, 60%, 65%, 70%, 75%, 80%, 85%, 90%, 95%, 97%, 98%, 99%, 99.5%, 99.6%, 99.7%, 99.8%, or 99.9% sequence identity to the sequence of SEQ ID NO: 3648; and (iii) a third polypeptide comprising, from the N-terminus to the C-terminus, a sequence having at least 50%, 55%, 60%, 65%, 70%, 75%, 80%, 85%, 90%, 95%, 97%, 98%, 99%, 99.5%, 99.6%, 99.7%, 99.8%, or 99.9% sequence identity to the sequence of SEQ ID NO: 1349 operatively linked to a sequence having at least 50%, 55%, 60%, 65%, 70%, 75%, 80%, 85%, 90%, 95%, 97%, 98%, 99%, 99.5%, 99.6%, 99.7%, 99.8%, or 99.9% sequence identity to the sequence of SEQ ID NO: 3644.

[1095] In some embodiments, the multifunctional polypeptide molecule comprises: (i) a first polypeptide comprising, from the N-terminus to the C-terminus, the sequence of SEQ ID NO: 1346 operatively linked to the sequence of SEQ ID NO: 3649; (ii) a second polypeptide comprising, from the N-terminus to the C-terminus, the sequence of SEQ ID NO: 3540 operatively linked to the sequence of SEQ ID NO: 3648; and (iii) a third polypeptide comprising, from the N-terminus to the C-terminus, the sequence of SEQ ID NO: 1349 operatively linked to the sequence of SEQ ID NO: 3644.

[1096] In some embodiments, a sequence having at least 50%, 55%, 60%, 65%, 70%, 75%, 80%, 85%, 90%, 95%, 97%, 98%, 99%, 99.5%, 99.6%, 99.7%, 99.8%, or 99.9% sequence identity to the sequence of SEQ ID NO: 3540 is operatively linked to a sequence having at least 50%, 55%, 60%, 65%, 70%, 75%, 80%, 85%, 90%, 95%, 97%, 98%, 99%, 99.5%, 99.6%, 99.7%, 99.8%, or 99.9% sequence identity to the sequence of SEQ ID NO: 3648 via a sequence having at least 50%, 55%, 60%, 65%, 70%, 75%, 80%, 85%, 90%, 95%, 97%, 98%, 99%, 99.5%, 99.6%, 99.7%, 99.8%, or 99.9% sequence identity to the sequence of SEQ ID NO: 3308, or a combination thereof.

[1097] In some embodiments, the sequence of SEQ ID NO: 3540 is operatively linked to the sequence of SEQ ID NO: 3648 via the sequence of SEQ ID NO: 3308, or a combination thereof.

[1098] In some embodiments, the multifunctional polypeptide molecule comprises: (i) a first polypeptide comprising a sequence having at least 50%, 55%, 60%, 65%, 70%, 75%, 80%, 85%, 90%, 95%, 97%, 98%, 99%, 99.5%, 99.6%, 99.7%, 99.8%, or 99.9% sequence identity to the sequence of SEQ ID NO: 3517; (ii) a second polypeptide comprising a sequence having at least 50%, 55%, 60%, 65%, 70%, 75%, 80%, 85%, 90%, 95%, 97%, 98%, 99%, 99.5%, 99.6%, 99.7%, 99.8%, or 99.9% sequence identity to the sequence of SEQ ID NO: 3539; and (iii) a third polypeptide comprising a sequence having at least 50%, 55%, 60%, 65%, 70%, 75%, 80%, 85%, 90%, 95%, 97%, 98%, 99%, 99.5%, 99.6%, 99.7%, 99.8%, or 99.9% sequence identity to the sequence of SEQ ID NO: 3518.

[1099] In some embodiments, the multifunctional polypeptide molecule comprises: (i) a first polypeptide comprising the sequence of SEQ ID NO: 3517; (ii) a second polypeptide comprising the sequence of SEQ ID NO: 3539; and (iii) a third polypeptide comprising to the sequence of SEQ ID NO: 3518.

[1100] In some embodiments, the multifunctional polypeptide molecule comprises: (i) a first polypeptide comprising a sequence having at least 50%, 55%, 60%, 65%, 70%, 75%, 80%, 85%, 90%, 95%, 97%, 98%, 99%, 99.5%, 99.6%, 99.7%, 99.8%, or 99.9% sequence identity to the sequence of SEQ ID NO: 1346, and a sequence having at least 50%, 55%, 60%, 65%, 70%, 75%, 80%, 85%, 90%, 95%, 97%, 98%, 99%, 99.5%, 99.6%, 99.7%, 99.8%, or 99.9% sequence identity to the sequence of SEQ ID NO: 3649; (ii) a second polypeptide comprising a sequence having at least 50%, 55%, 60%, 65%, 70%, 75%, 80%, 85%, 90%, 95%, 97%, 98%, 99%, 99.5%, 99.6%, 99.7%, 99.8%, or 99.9% sequence identity to the sequence of SEQ ID NO: 3542, and a sequence having at least 50%, 55%, 60%, 65%, 70%, 75%, 80%, 85%, 90%, 95%, 97%, 98%, 99%, 99.5%, 99.6%, 99.7%, 99.8%, or 99.9% sequence identity to the sequence of SEQ ID NO: 3648; and (iii) a third polypeptide comprising a sequence having at least 50%, 55%, 60%, 65%, 70%, 75%, 80%, 85%, 90%, 95%, 97%, 98%, 99%, 99.5%, 99.6%, 99.7%, 99.8%, or 99.9% sequence identity to the sequence of SEQ ID NO: 1349, and a sequence having at least 50%, 55%, 60%, 65%, 70%, 75%, 80%, 85%, 90%, 95%, 97%, 98%, 99%, 99.5%, 99.6%, 99.7%, 99.8%, or 99.9% sequence identity to the sequence of SEQ ID NO: 3644.

[1101] In some embodiments, the multifunctional polypeptide molecule comprises: (i) a first polypeptide comprising the sequence of SEQ ID NO: 1346, and the sequence of SEQ ID NO: 3649; (ii) a second polypeptide comprising the sequence of SEQ ID NO: 3542, and the sequence of SEQ ID NO: 3648; and (iii) a third polypeptide comprising the sequence of SEQ ID NO: 1349, and the sequence of SEQ ID NO: 3644.

[1102] In some embodiments, the multifunctional polypeptide molecule comprises: (i) a first polypeptide comprising, from the N-terminus to the C-terminus, a sequence having at least 50%, 55%, 60%, 65%, 70%, 75%, 80%, 85%, 90%, 95%, 97%, 98%, 99%, 99.5%, 99.6%, 99.7%, 99.8%, or 99.9% sequence identity to the sequence of SEQ ID NO: 1346 operatively linked to a sequence having at least 50%, 55%, 60%, 65%, 70%, 75%, 80%, 85%, 90%, 95%, 97%, 98%, 99%, 99.5%, 99.6%, 99.7%, 99.8%, or 99.9% sequence identity to the sequence of SEQ ID NO: 3649; (ii) a second polypeptide comprising, from the N-terminus to the C-terminus, a sequence having at least 50%, 55%, 60%, 65%, 70%, 75%, 80%, 85%, 90%, 95%, 97%, 98%, 99%, 99.5%, 99.6%, 99.7%, 99.8%, or 99.9% sequence identity to the sequence of SEQ ID NO: 3542 operatively linked to a sequence having at least 50%, 55%, 60%, 65%, 70%, 75%, 80%, 85%, 90%, 95%, 97%, 98%, 99%, 99.5%, 99.6%, 99.7%, 99.8%, or 99.9% sequence identity to the sequence of SEQ ID NO: 3648; and (iii) a third polypeptide comprising, from the N-terminus to the C-terminus, a sequence having at least 50%, 55%, 60%, 65%, 70%, 75%, 80%, 85%, 90%, 95%, 97%, 98%, 99%, 99.5%, 99.6%, 99.7%, 99.8%, or 99.9% sequence identity to the sequence of SEQ ID NO: 1349 operatively linked to a sequence having at least 50%, 55%, 60%, 65%, 70%, 75%, 80%, 85%, 90%, 95%, 97%, 98%, 99%, 99.5%, 99.6%, 99.7%, 99.8%, or 99.9% sequence identity to the sequence of SEQ ID NO: 3644.

[1103] In some embodiments, the multifunctional polypeptide molecule comprises: (i) a first polypeptide comprising, from the N-terminus to the C-terminus, the sequence of SEQ ID NO: 1346 operatively linked to the sequence of SEQ ID NO: 3649; (ii) a second polypeptide comprising, from the N-terminus to the C-terminus, the sequence of SEQ ID NO: 3542 operatively linked to the sequence of SEQ ID NO: 3648; and (iii) a third polypeptide comprising, from the N-terminus to the C-terminus, the sequence of SEQ ID NO: 1349 operatively linked to the sequence of SEQ ID NO: 3644.

[1104] In some embodiments, the IL-12 molecule or a functional fragment or a functional variant thereof comprises a sequence having at least 50%, 55%, 60%, 65%, 70%, 75%, 80%, 85%, 90%, 95%, 97%, 98%, 99%, 99.5%, 99.6%, 99.7%, 99.8%, or 99.9% sequence identity to the sequence of SEQ ID NO: 3543 and a sequence having at least 50%, 55%, 60%, 65%, 70%, 75%, 80%, 85%, 90%, 95%, 97%, 98%, 99%, 99.5%, 99.6%, 99.7%, 99.8%, or 99.9% sequence identity to the sequence of SEQ ID NO: 3545.

[1105] In some embodiments, the IL-12 molecule or a functional fragment or a functional variant thereof comprises the sequence of SEQ ID NO: 3543 and the sequence of SEQ ID NO: 3545.

[1106] In some embodiments, the IL-12 molecule or a functional fragment or a functional variant thereof comprises, from the N-terminus to the C-terminus, a sequence having at least 50%, 55%, 60%, 65%, 70%, 75%, 80%, 85%, 90%, 95%, 97%, 98%, 99%, 99.5%, 99.6%, 99.7%, 99.8%, or 99.9% sequence identity to the sequence of SEQ ID NO: 3543 operatively linked to a sequence having at least 50%, 55%, 60%, 65%, 70%, 75%, 80%, 85%, 90%, 95%, 97%, 98%, 99%, 99.5%, 99.6%, 99.7%, 99.8%, or 99.9% sequence identity to the sequence of SEQ ID NO:3545.

[1107] In some embodiments, the IL-12 molecule or a functional fragment or a functional variant thereof comprises, from the N-terminus to the C-terminus, the sequence of SEQ ID NO: 3543 operatively linked to the sequence of SEQ ID NO:3545.

[1108] In some embodiments, a sequence having at least 50%, 55%, 60%, 65%, 70%, 75%, 80%, 85%, 90%, 95%, 97%, 98%, 99%, 99.5%, 99.6%, 99.7%, 99.8%, or 99.9% sequence identity to the sequence of SEQ ID NO: 3543 is operatively linked to a sequence having at least 50%, 55%, 60%, 65%, 70%, 75%, 80%, 85%, 90%, 95%, 97%, 98%, 99%, 99.5%, 99.6%, 99.7%, 99.8%, or 99.9% sequence identity to the sequence of SEQ ID NO: 3545 via a sequence having at least 50%, 55%, 60%, 65%, 70%, 75%, 80%, 85%, 90%, 95%, 97%, 98%, 99%, 99.5%, 99.6%, 99.7%, 99.8%, or 99.9% sequence identity to the sequence of SEQ ID NO: 3544, a sequence having at least 50%, 55%, 60%, 65%, 70%, 75%, 80%, 85%, 90%, 95%, 97%, 98%, 99%, 99.5%, 99.6%, 99.7%, 99.8%, or 99.9% sequence identity to the sequence of SEQ ID NO: 3545 is operatively linked to a sequence having at least 50%, 55%, 60%, 65%, 70%, 75%, 80%, 85%, 90%, 95%, 97%, 98%, 99%, 99.5%, 99.6%, 99.7%, 99.8%, or 99.9% sequence identity to the sequence of SEQ ID NO: 3648 via a sequence having at least 50%, 55%, 60%, 65%, 70%, 75%, 80%, 85%, 90%, 95%, 97%, 98%, 99%, 99.5%, 99.6%, 99.7%, 99.8%, or 99.9% sequence identity to the sequence of SEQ ID NO: 3308, or a combination thereof.

[1109] In some embodiments, the sequence of SEQ ID NO: 3543 is operatively linked to the sequence of SEQ ID NO: 3545 via the sequence of SEQ ID NO: 3544, the sequence of SEQ ID NO: 3545 is operatively linked to the sequence of SEQ ID NO: 3648 via the sequence of SEQ ID NO: 3308, or a combination thereof.

[1110] In some embodiments, the multifunctional polypeptide molecule comprises: (i) a first polypeptide comprising a sequence having at least 50%, 55%, 60%, 65%, 70%, 75%, 80%, 85%, 90%, 95%, 97%, 98%, 99%, 99.5%, 99.6%, 99.7%, 99.8%, or 99.9% sequence identity to the sequence of SEQ ID NO: 3517; (ii) a second polypeptide comprising a sequence having at least 50%, 55%, 60%, 65%, 70%, 75%, 80%, 85%, 90%, 95%, 97%, 98%, 99%, 99.5%, 99.6%, 99.7%, 99.8%, or 99.9% sequence identity to the sequence of SEQ ID NO: 3541; and (iii) a third polypeptide comprising a sequence having at least 50%, 55%, 60%, 65%, 70%, 75%, 80%, 85%, 90%, 95%, 97%, 98%, 99%, 99.5%, 99.6%, 99.7%, 99.8%, or 99.9% sequence identity to the sequence of SEQ ID NO: 3518.

[1111] In some embodiments, the multifunctional polypeptide molecule comprises: (i) a first polypeptide comprising the sequence of SEQ ID NO: 3517; (ii) a second polypeptide comprising the sequence of SEQ ID NO: 3541; and (iii) a third polypeptide comprising to the sequence of SEQ ID NO: 3518.

[1112] In some embodiments, the multifunctional polypeptide molecule comprises: (i) a first polypeptide comprising a sequence having at least 50%, 55%, 60%, 65%, 70%, 75%, 80%, 85%, 90%, 95%, 97%, 98%, 99%, 99.5%, 99.6%, 99.7%, 99.8%, or 99.9% sequence identity to the sequence of SEQ ID NO: 1346, and a sequence having at least 50%, 55%, 60%, 65%, 70%, 75%, 80%, 85%, 90%, 95%, 97%, 98%, 99%, 99.5%, 99.6%, 99.7%, 99.8%, or 99.9% sequence identity to the sequence of SEQ ID NO: 3649; (ii) a second polypeptide comprising a sequence having at least 50%, 55%, 60%, 65%, 70%, 75%, 80%, 85%, 90%, 95%, 97%, 98%, 99%, 99.5%, 99.6%, 99.7%, 99.8%, or 99.9% sequence identity to the sequence of SEQ ID NO: 3540, and a sequence having at least 50%, 55%, 60%, 65%, 70%, 75%, 80%, 85%, 90%, 95%, 97%, 98%, 99%, 99.5%, 99.6%, 99.7%, 99.8%, or 99.9% sequence identity to the sequence of SEQ ID NO: 3648; and (iii) a third polypeptide comprising a sequence having at least 50%, 55%, 60%, 65%, 70%, 75%, 80%, 85%, 90%, 95%, 97%, 98%, 99%, 99.5%, 99.6%, 99.7%, 99.8%, or 99.9% sequence identity to the sequence of SEQ ID NO: 1349, and a sequence having at least 50%, 55%, 60%, 65%, 70%, 75%, 80%, 85%, 90%, 95%, 97%, 98%, 99%, 99.5%, 99.6%, 99.7%, 99.8%, or 99.9% sequence identity to the sequence of SEQ ID NO: 3644.

[1113] In some embodiments, the multifunctional polypeptide molecule comprises: (i) a first polypeptide comprising the sequence of SEQ ID NO: 1346, and the sequence of SEQ ID NO: 3649; (ii) a second polypeptide comprising the sequence of SEQ ID NO: 2193, and the sequence of SEQ ID NO: 3648; and (iii) a third polypeptide comprising the sequence of SEQ ID NO: 1349, and the sequence of SEQ ID NO: 3644.

[1114] In some embodiments, the multifunctional polypeptide molecule comprises: (i) a first polypeptide comprising, from the N-terminus to the C-terminus, a sequence having at least 50%, 55%, 60%, 65%, 70%, 75%, 80%, 85%, 90%, 95%, 97%, 98%, 99%, 99.5%, 99.6%, 99.7%, 99.8%, or 99.9% sequence identity to the sequence of SEQ ID NO: 1346 operatively linked to a sequence having at least 50%, 55%, 60%, 65%, 70%, 75%, 80%, 85%, 90%, 95%, 97%, 98%, 99%, 99.5%, 99.6%, 99.7%, 99.8%, or 99.9% sequence identity to the sequence of SEQ ID NO: 3649; (ii) a second polypeptide comprising, from the N-terminus to the C-terminus, a sequence having at least 50%, 55%, 60%, 65%, 70%, 75%, 80%, 85%, 90%, 95%, 97%, 98%, 99%, 99.5%, 99.6%, 99.7%, 99.8%, or 99.9% sequence identity to the sequence of SEQ ID NO: 2193 operatively linked to a sequence having at least 50%, 55%, 60%, 65%, 70%, 75%, 80%, 85%, 90%, 95%, 97%, 98%, 99%, 99.5%, 99.6%, 99.7%, 99.8%, or 99.9% sequence identity to the sequence of SEQ ID NO: 3648; and (iii) a third polypeptide comprising, from the N-terminus to the C-terminus, a sequence having at least 50%, 55%, 60%, 65%, 70%, 75%, 80%, 85%, 90%, 95%, 97%, 98%, 99%, 99.5%, 99.6%, 99.7%, 99.8%, or 99.9% sequence identity to the sequence of SEQ ID NO: 1349 operatively linked to a sequence having at least 50%, 55%, 60%, 65%, 70%, 75%, 80%, 85%, 90%, 95%, 97%, 98%, 99%, 99.5%, 99.6%, 99.7%, 99.8%, or 99.9% sequence identity to the sequence of SEQ ID NO: 3644.

[1115] In some embodiments, the multifunctional polypeptide molecule comprises: (i) a first polypeptide comprising, from the N-terminus to the C-terminus, the sequence of SEQ ID NO: 1346 operatively linked to the sequence of SEQ ID NO: 3649; (ii) a second polypeptide comprising, from the N-terminus to the C-terminus, the sequence of SEQ ID NO: 2193 operatively linked to the sequence of SEQ ID NO: 3648; and (iii) a third polypeptide comprising, from the N-terminus to the C-terminus, the sequence of SEQ ID NO: 1349 operatively linked to the sequence of SEQ ID NO: 3644.

[1116] In some embodiments, a sequence having at least 50%, 55%, 60%, 65%, 70%, 75%, 80%, 85%, 90%, 95%, 97%, 98%, 99%, 99.5%, 99.6%, 99.7%, 99.8%, or 99.9% sequence identity to the sequence of SEQ ID NO: 2193 is operatively linked to a sequence having at least 50%, 55%, 60%, 65%, 70%, 75%, 80%, 85%, 90%, 95%, 97%, 98%, 99%, 99.5%, 99.6%, 99.7%, 99.8%, or 99.9% sequence identity to the sequence of SEQ ID NO: 3648 via a sequence having at least 50%, 55%, 60%, 65%, 70%, 75%, 80%, 85%, 90%, 95%, 97%, 98%, 99%, 99.5%, 99.6%, 99.7%, 99.8%, or 99.9% sequence identity to the sequence of SEQ ID NO: 3308.

[1117] In some embodiments, the sequence of SEQ ID NO: 2193 is operatively linked to the sequence of SEQ ID NO: 3648 via the sequence of SEQ ID NO: 3308.

[1118] In some embodiments, the multifunctional polypeptide molecule comprises: (i) a first polypeptide comprising a sequence having at least 50%, 55%, 60%, 65%, 70%, 75%, 80%, 85%, 90%, 95%, 97%, 98%, 99%, 99.5%, 99.6%, 99.7%, 99.8%, or 99.9% sequence identity to the sequence of SEQ ID NO: 3517; (ii) a second polypeptide comprising a sequence having at least 50%, 55%, 60%, 65%, 70%, 75%, 80%, 85%, 90%, 95%, 97%, 98%, 99%, 99.5%, 99.6%, 99.7%, 99.8%, or 99.9% sequence identity to the sequence of SEQ ID NO: 3546; and (iii) a third polypeptide comprising a sequence having at least 50%, 55%, 60%, 65%, 70%, 75%, 80%, 85%, 90%, 95%, 97%, 98%, 99%, 99.5%, 99.6%, 99.7%, 99.8%, or 99.9% sequence identity to the sequence of SEQ ID NO: 3518.

[1119] In some embodiments, the multifunctional polypeptide molecule comprises: (i) a first polypeptide comprising the sequence of SEQ ID NO: 3517; (ii) a second polypeptide comprising the sequence of SEQ ID NO: 3546; and (iii) a third polypeptide comprising to the sequence of SEQ ID NO: 3518.

[1120] In some embodiments, the multifunctional polypeptide molecule comprises: (i) a first polypeptide comprising a sequence having at least 50%, 55%, 60%, 65%, 70%, 75%, 80%, 85%, 90%, 95%, 97%, 98%, 99%, 99.5%, 99.6%, 99.7%, 99.8%, or 99.9% sequence identity to the sequence of SEQ ID NO: 3530 and a sequence having at least 50%, 55%, 60%, 65%, 70%, 75%, 80%, 85%, 90%, 95%, 97%, 98%, 99%, 99.5%, 99.6%, 99.7%, 99.8%, or 99.9% sequence identity to the sequence of SEQ ID NO: 3537; and (ii) a second polypeptide comprising a sequence having at least 50%, 55%, 60%, 65%, 70%, 75%, 80%, 85%, 90%, 95%, 97%, 98%, 99%, 99.5%, 99.6%, 99.7%, 99.8%, or 99.9% sequence identity to the sequence of SEQ ID NO: 3527, a sequence having at least 50%, 55%, 60%, 65%, 70%, 75%, 80%, 85%, 90%, 95%, 97%, 98%, 99%, 99.5%, 99.6%, 99.7%, 99.8%, or 99.9% sequence identity to the sequence of SEQ ID NO: 3528, and a sequence having at least 50%, 55%, 60%, 65%, 70%, 75%, 80%, 85%, 90%, 95%, 97%, 98%, 99%, 99.5%, 99.6%, 99.7%, 99.8%, or 99.9% sequence identity to the sequence of SEQ ID NO: 2191.

[1121] In some embodiments, the multifunctional polypeptide molecule comprises: (i) a first polypeptide comprising the sequence of SEQ ID NO: 3530 and the sequence of SEQ ID NO: 3537; and (ii) a second polypeptide comprising the sequence of SEQ ID NO: 3527, the sequence of SEQ ID NO: 3528, and the sequence of SEQ ID NO: 2191.

[1122] In some embodiments, the multifunctional polypeptide molecule comprises: (i) a first polypeptide comprising, from the N-terminus to the C-terminus, a sequence having at least 50%, 55%, 60%, 65%, 70%, 75%, 80%, 85%, 90%, 95%, 97%, 98%, 99%, 99.5%, 99.6%, 99.7%, 99.8%, or 99.9% sequence identity to the sequence of SEQ ID NO: 3530 operatively linked to a sequence having at least 50%, 55%, 60%, 65%, 70%, 75%, 80%, 85%, 90%, 95%, 97%, 98%, 99%, 99.5%, 99.6%, 99.7%, 99.8%, or 99.9% sequence identity to the sequence of SEQ ID NO: 3537; and (ii) a second polypeptide comprising, from the N-terminus to the C-terminus, a sequence having at least 50%, 55%, 60%, 65%, 70%, 75%, 80%, 85%, 90%, 95%, 97%, 98%, 99%, 99.5%, 99.6%, 99.7%, 99.8%, or 99.9% sequence identity to the sequence of SEQ ID NO: 3527 operatively linked to a sequence having at least 50%, 55%, 60%, 65%, 70%, 75%, 80%, 85%, 90%, 95%, 97%, 98%, 99%, 99.5%, 99.6%, 99.7%, 99.8%, or 99.9% sequence identity to the sequence of SEQ ID NO: 3528 operatively linked to a sequence having at least 50%, 55%, 60%, 65%, 70%, 75%, 80%, 85%, 90%, 95%, 97%, 98%, 99%, 99.5%, 99.6%, 99.7%, 99.8%, or 99.9% sequence identity to the sequence of SEQ ID NO: 2191.

[1123] In some embodiments, the multifunctional polypeptide molecule comprises: (i) a first polypeptide comprising, from the N-terminus to the C-terminus, the sequence of SEQ ID NO: 3530 operatively linked to the sequence of SEQ ID NO: 3537; and (ii) a second polypeptide comprising, from the N-terminus to the C-terminus, the sequence of SEQ ID NO: 3527 operatively linked to the sequence of SEQ ID NO: 3528 operatively linked to the sequence of SEQ ID NO: 2191.

[1124] In some embodiments, a sequence having at least 50%, 55%, 60%, 65%, 70%, 75%, 80%, 85%, 90%, 95%, 97%, 98%, 99%, 99.5%, 99.6%, 99.7%, 99.8%, or 99.9% sequence identity to the sequence of SEQ ID NO: 3528 is operatively linked to a sequence having at least 50%, 55%, 60%, 65%, 70%, 75%, 80%, 85%, 90%, 95%, 97%, 98%, 99%, 99.5%, 99.6%, 99.7%, 99.8%, or 99.9% sequence identity to the sequence of SEQ ID NO: 2191 via a sequence having at least 50%, 55%, 60%, 65%, 70%, 75%, 80%, 85%, 90%, 95%, 97%, 98%, 99%, 99.5%, 99.6%, 99.7%, 99.8%, or 99.9% sequence identity to the sequence of SEQ ID NO: 3309.

[1125] In some embodiments, the sequence of SEQ ID NO: 3528 is operatively linked to the sequence of SEQ ID NO: 2191 via the sequence of SEQ ID NO: 3309.

[1126] In some embodiments, the multifunctional polypeptide molecule comprises two first polypeptides and two second polypeptides.

[1127] In some embodiments, the multifunctional polypeptide molecule comprises: (i) a first polypeptide comprising a sequence having at least 50%, 55%, 60%, 65%, 70%, 75%, 80%, 85%, 90%, 95%, 97%, 98%, 99%, 99.5%, 99.6%, 99.7%, 99.8%, or 99.9% sequence identity to the sequence of SEQ ID NO: 3536; and (ii) a second polypeptide comprising a sequence having at least 50%, 55%, 60%, 65%, 70%, 75%, 80%, 85%, 90%, 95%, 97%, 98%, 99%, 99.5%, 99.6%, 99.7%, 99.8%, or 99.9% sequence identity to the sequence of SEQ ID NO: 3535.

[1128] In some embodiments, the multifunctional polypeptide molecule comprises: (i) a first polypeptide comprising the sequence of SEQ ID NO: 3536; and (ii) a second polypeptide comprising the sequence of SEQ ID NO: 3535.

[1129] In some embodiments, the multifunctional polypeptide molecule comprises: (i) a first polypeptide comprising one or more components as listed in Table 21; and (ii) a second polypeptide comprising one or more components as listed in Table 21. In some embodiments, the multifunctional polypeptide molecule further comprises: (i) a third polypeptide comprising one or more components as listed in Table 21; and (ii) a fourth polypeptide comprising one or more components as listed in Table 21.

[1130] In some embodiments, the multifunctional polypeptide molecule comprises: (i) a first polypeptide comprising one or more components comprising a sequence having at least 50%, 55%, 60%, 65%, 70%, 75%, 80%, 85%, 90%, 95%, 97%, 98%, 99%, 99.5%, 99.6%, 99.7%, 99.8%, or 99.9% sequence identity to any one of the component sequences as listed in Table 21; and (ii) a second polypeptide comprising one or more components comprising a sequence having at least 50%, 55%, 60%, 65%, 70%, 75%, 80%, 85%, 90%, 95%, 97%, 98%, 99%, 99.5%, 99.6%, 99.7%, 99.8%, or 99.9% sequence identity to any one of the component sequences as listed in Table 21. In some embodiments, the multifunctional polypeptide molecule further comprises: (i) a third polypeptide comprising one or more components comprising a sequence having at least 50%, 55%, 60%, 65%, 70%, 75%, 80%, 85%, 90%, 95%, 97%, 98%, 99%, 99.5%, 99.6%, 99.7%, 99.8%, or 99.9% sequence identity to any one of the component sequences as listed in Table 21; and (ii) a fourth polypeptide comprising one or more components comprising a sequence having at least 50%, 55%, 60%, 65%, 70%, 75%, 80%, 85%, 90%, 95%, 97%, 98%, 99%, 99.5%, 99.6%, 99.7%, 99.8%, or 99.9% sequence identity to any one of the component sequences as listed in Table 21.

[1131] In some embodiments, the multifunctional polypeptide molecule comprises: (i) a first polypeptide comprising one or more component sequences as listed in Table 21; and (ii) a second polypeptide comprising one or more component sequences as listed in Table 21. In some embodiments, the multifunctional polypeptide molecule further comprises: (i) a third polypeptide comprising one or more component sequences as listed in Table 21; and (ii) a fourth polypeptide comprising one or more component sequences as listed in Table 21.

[1132] In some embodiments, the multifunctional polypeptide molecule comprises: (i) a first polypeptide comprising an amino acid sequence having at least 50%, 55%, 60%, 65%, 70%, 75%, 80%, 85%, 90%, 95%, 97%, 98%, 99%, 99.5%, 99.6%, 99.7%, 99.8%, or 99.9% sequence identity to any one of the polypeptide sequences as listed in Table 21; and (ii) a second polypeptide comprising an amino acid sequence having at least 50%, 55%, 60%, 65%, 70%, 75%, 80%, 85%, 90%, 95%, 97%, 98%, 99%, 99.5%, 99.6%, 99.7%, 99.8%, or 99.9% sequence identity to any one of the polypeptide sequences as listed in Table 21. In some embodiments, the multifunctional polypeptide molecule further comprises: (i) a third polypeptide comprising an amino acid sequence having at least 50%, 55%, 60%, 65%, 70%, 75%, 80%, 85%, 90%, 95%, 97%, 98%, 99%, 99.5%, 99.6%, 99.7%, 99.8%, or 99.9% sequence identity to any one of the polypeptide sequences as listed in Table 21; and (ii) a fourth polypeptide comprising an amino acid sequence having at least 50%, 55%, 60%, 65%, 70%, 75%, 80%, 85%, 90%, 95%, 97%, 98%, 99%, 99.5%, 99.6%, 99.7%, 99.8%, or 99.9% sequence identity to any one of the polypeptide sequences as listed in Table 21.

[1133] In some embodiments, the multifunctional polypeptide molecule comprises: (i) a first polypeptide comprising any one of the polypeptide sequences as listed in Table 21; and (ii) a second polypeptide comprising any one of the polypeptide sequences as listed in Table 21. In some embodiments, the multifunctional polypeptide molecule further comprises: (i) a third polypeptide comprising any one of the polypeptide sequences as listed in Table 21; and (ii) a fourth polypeptide comprising one or more comprising any one of the polypeptide sequences as listed in Table 21.

[1134] In another aspect, described herein is an antibody comprising an anti-T cell receptor beta variable chain (TCRβV) binding domain comprising: (i) a heavy chain variable region (VH) comprising a heavy chain complementarity determining region 1 (HC CDR1), a heavy chain complementarity determining region 2 (HC CDR2), and a heavy chain complementarity determining region 3 (HC CDR3) comprising an amino acid sequence having at least 50%, 55%, 60%, 65%, 70%, 75%, 80%, 85%, 90%, 95%, 97%, 98%, 99%, 99.5%, 99.6%, 99.7%, 99.8%, or 99.9% sequence identity to SEQ ID NO: 3650, SEQ ID NO: 3651, and SEQ ID NO: 5, respectively; (ii) a light chain variable region (VL) comprising a light chain complementarity determining region 1 (LC CDR1), a light chain complementarity determining region 2 (LC CDR2), and a light chain complementarity determining region 3 (LC CDR3) comprising an amino acid sequence having at least 50%, 55%, 60%, 65%, 70%, 75%, 80%, 85%, 90%, 95%, 97%, 98%, 99%, 99.5%, 99.6%, 99.7%, 99.8%, or 99.9% sequence identity to SEQ ID NO: 3655, SEQ ID NO: 3653, and SEQ ID NO: 8, respectively; or (iii) a combination thereof.

[1135] In some embodiments, the TCRβV binding domain comprising: (i) a VH comprising a HC CDR1, a HC CDR2, and a HC CDR3 comprising the amino acid sequence of SEQ ID NO: 3650, SEQ ID NO: 3651, and SEQ ID NO: 5, respectively; (ii) a VL comprising a LC CDR1, a LC CDR2, and a LC CDR3 comprising the amino acid sequence of SEQ ID NO: 3655, SEQ ID NO: 3653, and SEQ ID NO: 8, respectively; or (iii) a combination thereof.

[1136] In some embodiments, the TCRβV binding domain comprising: (i) a VH comprising an amino acid sequence having at least 50%, 55%, 60%, 65%, 70%, 75%, 80%, 85%, 90%, 95%, 97%, 98%, 99%, 99.5%, 99.6%, 99.7%, 99.8%, or 99.9% sequence identity to SEQ ID NO: 1346; (ii) a VL comprising an amino acid sequence having at least 50%, 55%, 60%, 65%, 70%, 75%, 80%, 85%, 90%, 95%, 97%, 98%, 99%, 99.5%, 99.6%, 99.7%, 99.8%, or 99.9% sequence identity to SEQ ID NO: 1349; or (iii) a combination thereof.

[1137] In some embodiments, the TCRβV binding domain comprising: (i) a VH comprising the amino acid sequence of SEQ ID NO: 1346; (ii) a VL comprising the amino acid sequence of SEQ ID NO: 1349; or (iii) a combination thereof.

[1138] In some embodiments, the antibody comprising an anti-T cell receptor beta variable chain (TCRβV) binding domain further comprises a cytokine polypeptide or a functional fragment or a functional variant thereof. In some embodiments, the cytokine polypeptide may be IL-2, IL2-C125A. IL-15, IL-7, IL-12, or IL-21. In embodiments, the cytokine polypeptide may further comprise a cytokine receptor. In some embodiments, the cytokine polypeptide may comprise IL-15 linked to a IL-15Ra. In some embodiments, the cytokine polypeptide may comprise IL-15 linked to a IL-15Ra sushi domain. In some embodiments, the cytokine polypeptide may comprise a cytokine dimer. In some embodiments, the cytokine polypeptide may comprise an IL-12 beta subunit linked to an IL-12 alpha subunit.

TABLE 1
Amino acid and nucleotide sequences for murine, chimeric and humanized antibody molecules
which bind to TCRVB 6, e.g., TCRVB 6-5. The antibody molecules include murine mAb Antibody A,
and humanized mAb Antibody A-H Clones A-H.1 to A-H.85. The amino acid the heavy and light
chain CDRs, and the amino acid and nucleotide sequences of the heavy and light chain
variable regions, and the heavy and light chains are shown.
Antibody A (murine), also referred to as H131, TCRVB 6-5 binder

| | | |
|---|---|---|
| SEQ ID NO: 3 | HC CDR1 (Combined) | GYSFTTYYIH |
| SEQ ID NO: 4 | HC CDR2 (Combined) | WFFPGSGNIKYNEKFKG |
| SEQ ID NO: 5 | HC CDR3 (Combined) | SYYSYDVLDY |
| SEQ ID NO: 45 | HC CDR1 (Kabat) | TYYIH |
| SEQ ID NO: 46 | HC CDR2 (Kabat) | WFFPGSGNIKYNEKFKG |
| SEQ ID NO: 47 | HC CDR3 (Kabat) | SYYSYDVLDY |
| SEQ ID NO: 48 | HC CDR1 (Chothia) | GYSFTTY |
| SEQ ID NO: 49 | HC CDR2 (Chothia) | FPGSGN |
| SEQ ID NO: 50 | HC CDR3 (Chothia) | SYYSYDVLDY |
| SEQ ID NO: 1 | VH | QVQLQQSGPELVKPGTSVKISCKASGYSFTTYYIHWVKQRPG |
| | | QGLEWIGWFFPGSGNIKYNEKFKGKATLTADTSSSTAYMQLS |
| | | SLTSEESAVYFCAGSYYSYDVLDYWGHGTTLTVSS |
| SEQ ID NO: 6 | LC CDR1 (Combined) | KASQNVGINVV |
| SEQ ID NO: 7 | LC CDR2 (Combined) | SSSHRYS |
| SEQ ID NO: 8 | LC CDR3 (Combined) | QQFKSYPLT |
| SEQ ID NO: 51 | LC CDR1 (Kabat) | KASQNVGINVV |
| SEQ ID NO: 52 | LC CDR2 (Kabat) | SSSHRYS |
| SEQ ID NO: 53 | LC CDR3 (Kabat) | QQFKSYPLT |
| SEQ ID NO: 54 | LC CDR1 (Chothia) | KASQNVGINVV |
| SEQ ID NO: 55 | LC CDR2 (chothia) | SSSHRYS |
| SEQ ID NO: 56 | LC CDR3 (chothia) | QQFKSYPLT |
| SEQ ID NO: 2 | VL | DILMTQSQKFMSTSLGDRVSVSCKASQNVGINVVWHQQKPG |
| | | QSPKALIYSSSHRYSGVPDRFTGSGSGTDFTLTINNVQSEDLA |
| | | EYFCQQFKSYPLTFGAGTKLELK |

Antibody A humanized (A-H antibody), TCRVB 6-5 binder
A-H.1 antibody (also referred to as BHM1709)

| | | |
|---|---|---|
| SEQ ID NO: 3 | HC CDR1 (Combined) | GYSFTTYYIH |
| SEQ ID NO: 4 | HC CDR2 (Combined) | WFFPGSGNIKYNEKFKG |
| SEQ ID NO: 5 | HC CDR3 (Combined) | SYYSYDVLDY |
| SEQ ID NO: 9 | VH | QVQLVQSGAEVKKPGSSVKVSCKASGYSFTTYYIHWVRQAP |
| | | GQGLEWMGWFFPGSGNIKYNEKFKGRVTITADTSTSTAYME |
| | | LSSLRSEDTAVYYCAGSYYSYDVLDYWGQGTTVTVSS |
| SEQ ID NO: 12 | DNA VH | CAGGTGCAGCTGGTTCAGTCTGGCGCCGAAGTGAAGAAAC |
| | | CTGGCTCCTCCGTGAAGGTGTCCTGCAAGGCTTCCGGCTAC |
| | | TCCTTCACCACCTACTACATCCACTGGGTCCGACAGGCCCC |
| | | TGGACAAGGATTGGAATGGATGGGCTGGTTCTTCCCCGGC |
| | | TCCGGCAACATCAAGTACAACGAGAAGTTCAAGGGCCGCG |
| | | TGACCATCACCGCCGACACCTCTACCTCTACCGCCTACATG |
| | | GAACTGTCCAGCCTGAGATCTGAGGACACCGCCGTGTACT |
| | | ACTGCGCCGGCTCCTACTACTCTTACGACGTGCTGGATTAC |
| | | TGGGGCCAGGGCACCACAGTGACAGTGTCCTCT |
| SEQ ID NO: 69 | VH-IgM constant delta | METDTLLLWVLLLWVPGSTGQVQLVQSGAEVKKPGSSVKVS |
| | CDC | CKASGYSFTTYYIHWVRQAPGQGLEWMGWFFPGSGNIKYNE |
| | | KFKGRVTITADTSTSTAYMELSSLRSEDTAVYYCAGSYYSYD |
| | | VLDYWGQGTTVTVSSGSASAPTLFPLVSCENSPSDTSSVAVG |
| | | CLAQDFLPDSITFSWKYKNNSDISSTRGFPSVLRGGKYAATSQ |
| | | VLLPSKDVMQGTDEHVVCKVQHPNGNKEKNVPLPVIAELPP |
| | | KVSVFVPPRDGFFGNPRKSKLICQATGFSPRQIQVSWLREGKQ |
| | | VGSGVTTDQVQAEAKESGPTTYKVTSTLTIKESDWLGQSMFT |
| | | CRVDHRGLTFQQNASSMCVPDQDTAIRVFAIPPSFASIFLTKS |
| | | TKLTCLVTDLTTYDSVTISWTRQNGEAVKTHTNISESHPNATF |
| | | SAVGEASICEDDWNSGERFTCTVTHTDLASSLKQTISRPKGVA |
| | | LHRPDVYLLPPAREQLNLRESATITCLVTGFSPADVFVQWMQ |
| | | RGQPLSPEKYVTSAPMPEPQAPGRYFAHSILTVSEEEWNTGET |
| | | YTCVVAHEALPNRVTERTVDKSTGKPTLYNVSLVMSDTAGT |
| | | CY |
| SEQ ID NO: 70 | VH-IgGA1 | METDTLLLWVLLLWVPGSTGQVQLVQSGAEVKKPGSSVKVS |
| | | CKASGYSFTTYYIHWVRQAPGQGLEWMGWFFPGSGNIKYNE |
| | | KFKGRVTITADTSTSTAYMELSSLRSEDTAVYYCAGSYYSYD |
| | | VLDYWGQGTTVTVSSASPTSPKVFPLSLCSTQPDGNVVIACL |
| | | VQGFFPQEPLSVTWSESGQGVTARNFPPSQDASGDLYTTSSQ |
| | | LTLPATQCLAGKSVTCHVKHYTNPSQDVTVPCPVPSTPPTPSP |
| | | STPPTPSPSCCHPRLSLHRPALEDLLLGSEANLTCTLTGLRDAS |
| | | GVTFTWTPSSGKSAVQGPPERDLCGCYSVSSVLPGCAEPWNH |
| | | GKTFTCTAAYPESKTPLTATLSKSGNTFRPEVHLLPPPSEELAL |
| | | NELVTLTCLARGFSPKDVLVRWLQGSQELPREKYLTWASRQ |
| | | EPSQGTTTFAVTSILRVAAEDWKKGDTFSCMVGHEALPLAFT |
| | | QKTIDRLAGKPTHVNVSVVMAEVDGTCY |
| SEQ ID NO: 71 | VH-IgGA2 | METDTLLLWVLLLWVPGSTGQVQLVQSGAEVKKPGSSVKVS |
| | | CKASGYSFTTYYIHWVRQAPGQGLEWMGWFFPGSGNIKYNE |
| | | KFKGRVTITADTSTSTAYMELSSLRSEDTAVYYCAGSYYSYD |
| | | VLDYWGQGTTVTVSSASPTSPKVFPLSLDSTPQDGNVVVACL |
| | | VQGFFPQEPLSVTWSESGQNVTARNFPPSQDASGDLYTTSSQ |
| | | LTLPATQCPDGKSVTCHVKHYTNSSQDVTVPCRVPPPPPCCH |
| | | PRLSLHRPALEDLLLGSEANLTCTLTGLRDASGATFTWTPSSG |
| | | KSAVQGPPERDLCGCYSVSSVLPGCAQPWNHGETFTCTAAH |
| | | PELKTPLTANITKSGNTFRPEVHLLPPPSEELALNELVTLTCLA |
| | | RGFSPKDVLVRWLQGSQELPREKYLTWASRQEPSQGTTTYA |
| | | VTSILRVAAEDWKKGETFSCMVGHEALPLAFTQKTIDRMAG |
| | | KPTHINVSVVMAEADGTCY |
| SEQ ID NO: | Heavy chain | METDTLLLWVLLLWVPGSTGQVQLVQSGAEVKKPGSSVKVS |
| 3278 | | CKASGYSFTTYYIHWVRQAPGQGLEWMGWFFPGSGNIKYNE |
| | | KFKGRVTITADTSTSTAYMELSSLRSEDTAVYYCAGSYYSYD |
| | | VLDYWGQGTTVTVSSASTKGPSVFPLAPSSKSTSGGTAALGC |
| | | LVKDYFPEPVTVSWNSGALTSGVHTFPAVLQSSGLYSLSSVV |
| | | TVPSSSLGTQTYICNVNHKPSNTKVDKRVEPKSCDKTHTCPP |
| | | CPAPELLGGPSVFLFPPKPKDTLMISRTPEVTCVVVDVSHEDP |
| | | EVKFNWYVDGVEVHNAKTKPREEQYNSTYRVVSVLTVLHQ |
| | | DWLNGKEYKCKVSNKALPAPIEKTISKAKGQPREPQVYTLPP |
| | | SREEMTKNQVSLTCLVKGFYPSDIAVEWESNGQPENNYKTTP |
| | | PVLDSDGSFFLYSKLTVDKSRWQQGNVFSCSVMHEALHNHY |
| | | TQKSLSLSPGK |
| SEQ ID NO: 6 | LC CDR1 (Combined) | KASQNVGINVV |
| SEQ ID NO: 7 | LC CDR2 (Combined) | SSSHRYS |
| SEQ ID NO: 8 | LC CDR3 (Combined) | QQFKSYPLT |
| SEQ ID NO: 10 | VL | DIQMTQSPSFLSASVGDRVTITCKASQNVGINVVWHQQKPGK |
| | | APKALIYSSSHRYSGVPSRFSGSGSGTEFTLTISSLQPEDFATYF |
| | | CQQFKSYPLTFGQGTKLEIK |
| SEQ ID NO: 13 | DNA VL | GACATCCAGATGACCCAGTCTCCATCCTTCCTGTCCGCCTC |
| | | TGTGGGCGACAGAGTGACCATCACATGCAAGGCCTCTCAG |
| | | AACGTGGGCATCAACGTCGTGTGGCACCAGCAGAAGCCTG |
| | | GCAAGGCTCCTAAGGCTCTGATCTACTCCTCCAGCCACCG |
| | | GTACTCTGGCGTGCCCTCTAGATTTTCCGGCTCTGGCTCTG |
| | | GCACCGAGTTTACCCTGACAATCTCCAGCCTGCAGCCTGA |
| | | GGACTTCGCCACCTACTTTTGCCAGCAGTTCAAGAGCTACC |
| | | CTCTGACCTTTGGCCAGGGCACCAAGCTGGAAATCAAG |
| SEQ ID NO: 72 | VL and kappa constant | METDTLLLWVLLLWVPGSTGDIQMTQSPSFLSASVGDRVTIT |
| | region/light chain | CKASQNVGINVVWHQQKPGKAPKALIYSSSHRYSGVPSRFSG |
| | | SGSGTEFTLTISSLQPEDFATYFCQQFKSYPLTFGQGTKLEIKR |
| | | TVAAPSVFIFPPSDEQLKSGTASVVCLLNNFYPREAKVQWKV |
| | | DNALQSGNSQESVTEQDSKDSTYSLSSTLTLSKADYEKHKVY |
| | | ACEVTHQGLSSPVTKSFNRGEC |

A-H.2 antibody (also referred to as BHM1710)

| | | |
|---|---|---|
| SEQ ID NO: 3 | HC CDR1 (Combined) | GYSFTTYYIH |
| SEQ ID NO: 4 | HC CDR2 (Combined) | WFFPGSGNIKYNEKFKG |
| SEQ ID NO: 5 | HC CDR3 (Combined) | SYYSYDVLDY |
| SEQ ID NO: 9 | VH | QVQLVQSGAEVKKPGSSVKVSCKASGYSFTTYYIHWVRQAP |
| | | GQGLEWMGWFFPGSGNIKYNEKFKGRVTITADTSTSTAYME |
| | | LSSLRSEDTAVYYCAGSYYSYDVLDYWGQGTTVTVSS |
| SEQ ID NO: 12 | DNA VH | CAGGTGCAGCTGGTTCAGTCTGGCGCCGAAGTGAAGAAAC |
| | | CTGGCTCCTCCGTGAAGGTGTCCTGCAAGGCTTCCGGCTAC |
| | | TCCTTCACCACCTACTACATCCACTGGGTCCGACAGGCCCC |
| | | TGGACAAGGATTGGAATGGATGGGCTGGTTCTTCCCCGGC |
| | | TCCGGCAACATCAAGTACAACGAGAAGTTCAAGGGCCGCG |
| | | TGACCATCACCGCCGACACCTCTACCTCTACCGCCTACATG |
| | | GAACTGTCCAGCCTGAGATCTGAGGACACCGCCGTGTACT |
| | | ACTGCGCCGGCTCCTACTACTCTTACGACGTGCTGGATTAC |
| | | TGGGGCCAGGGCACCACAGTGACAGTGTCCTCT |
| SEQ ID NO: | Heavy chain | METDTLLLWVLLLWVPGSTGQVQLVQSGAEVKKPGSSVKVS |
| 3278 | | CKASGYSFTTYYIHWVRQAPGQGLEWMGWFFPGSGNIKYNE |
| | | KFKGRVTITADTSTSTAYMELSSLRSEDTAVYYCAGSYYSYD |
| | | VLDYWGQGTTVTVSSASTKGPSVFPLAPSSKSTSGGTAALGC |
| | | LVKDYFPEPVTVSWNSGALTSGVHTFPAVLQSSGLYSLSSVV |
| | | TVPSSSLGTQTYICNVNHKPSNTKVDKRVEPKSCDKTHTCPP |
| | | CPAPELLGGPSVFLFPPKPKDTLMISRTPEVTCVVVDVSHEDP |
| | | EVKFNWYVDGVEVHNAKTKPREEQYNSTYRVVSVLTVLHQ |
| | | DWLNGKEYKCKVSNKALPAPIEKTISKAKGQPREPQVYTLPP |
| | | SREEMTKNQVSLTCLVKGFYPSDIAVEWESNGQPENNYKTTP |
| | | PVLDSDGSFFLYSKLTVDKSRWQQGNVFSCSVMHEALHNHY |
| | | TQKSLSLSPGK |
| SEQ ID NO: 6 | LC CDR1 (Combined) | KASQNVGINVV |
| SEQ ID NO: 7 | LC CDR2 (Combined) | SSSHRYS |
| SEQ ID NO: 8 | LC CDR3 (Combined) | QQFKSYPLT |
| SEQ ID NO: 11 | VL | DIQMTQSPSSLSASVGDRVTITCKASQNVGINVVWHQQKPGK |
| | | VPKALIYSSSHRYSGVPSRFSGSGSGTDFTLTISSLQPEDVATY |
| | | FCQQFKSYPLTFGQGTKLEIK |
| SEQ ID NO: 14 | DNA VL | GACATCCAGATGACCCAGTCTCCATCCTCTCTGTCCGCCTC |
| | | TGTGGGCGACAGAGTGACCATCACATGCAAGGCCTCTCAG |
| | | AACGTGGGCATCAACGTCGTGTGGCACCAGCAGAAACCTG |
| | | GCAAGGTGCCCAAGGCTCTGATCTACTCCTCCAGCCACAG |
| | | ATACTCCGGCGTGCCCTCTAGATTCTCCGGCTCTGGCTCTG |
| | | GCACCGACTTTACCCTGACAATCTCCAGCCTGCAGCCTGA |
| | | GGACGTGGCCACCTACTTTTGCCAGCAGTTCAAGAGCTAC |
| | | CCTCTGACCTTTGGCCAGGGCACCAAGCTGGAAATCAAG |
| SEQ ID NO: | Light chain | METDTLLLWVLLLWVPGSTGDIQMTQSPSSLSASVGDRVTIT |
| 3279 | | CKASQNVGINVVWHQQKPGKVPKALIYSSSHRYSGVPSRFSG |
| | | SGSGTDFTLTISSLQPEDVATYFCQQFKSYPLTFGQGTKLEIKR |
| | | TVAAPSVFIFPPSDEQLKSGTASVVCLLNNFYPREAKVQWKV |
| | | DNALQSGNSQESVTEQDSKDSTYSLSSTLTLSKADYEKHKVY |
| | | ACEVTHQGLSSPVTKSFNRGEC |

A-H.3 antibody

| | | |
|---|---|---|
| SEQ ID NO: 80 | VH + VL | QVQLVQSGAEVKKPGSSVKVSCKASGTDFKLTYIHWVRQAP |
| | | GQGLEWMGRVSPGSGNTKYNEKFKGRVTITADTSTSTAYME |
| | | LSSLRSEDTAVYYCAGSYYSYDVLDYWGQGTTVTVSSGGGG |
| | | SGGGGSGGGGSGGGGSDIQMTQSPSFLSASVGDRVTITCKAS |
| | | QNVEDRVAWYQQKPGKAPKALIYSSSHRYKGVPSRFSGSGS |
| | | GTEFTLTISSLQPEDFATYFCQQFKSYPLTFGQGTKLEIK |
| SEQ ID NO: 81 | VL | DIQMTQSPSFLSASVGDRVTITCKASQNVEDRVAWYQQKPG |
| | | KAPKALIYSSSHRYKGVPSRFSGSGSGTEFTLTISSLQPEDFAT |
| | | YFCQQFKSYPLTFGQGTKLEIK |
| SEQ ID NO: 82 | VH | QVQLVQSGAEVKKPGSSVKVSCKASGTDFKLTYIHWVRQAP |
| | | GQGLEWMGRVSPGSGNTKYNEKFKGRVTITADTSTSTAYME |
| | | LSSLRSEDTAVYYCAGSYYSYDVLDYWGQGTTVTVSS |

A-H.4

| | | |
|---|---|---|
| SEQ ID NO: 83 | VH + VL | QVQLVQSGAEVKKPGSSVKVSCKASGTDFDKIYIHWVRQAP |
| | | GQGLEWMGRISAGSGNVKYNEKFKGRVTITADTSTSTAYME |
| | | LSSLRSEDTAVYYCAGSYYSYDVLDYWGQGTTVTVSSGGGG |
| | | SGGGGSGGGGSGGGGSDIQMTQSPSFLSASVGDRVTITCKAS |
| | | QNVEDRVAWYQQKPGKAPKALIYSSSHRYKGVPSRFSGSGS |
| | | GTEFTLTISSLQPEDFATYFCQQFKSYPLTFGQGTKLEIK |
| SEQ ID NO: 84 | VL | DIQMTQSPSFLSASVGDRVTITCKASQNVEDRVAWYQQKPG |
| | | KAPKALIYSSSHRYKGVPSRFSGSGSGTEFTLTISSLQPEDFAT |
| | | YFCQQFKSYPLTFGQGTKLEIK |
| SEQ ID NO: 85 | VH | QVQLVQSGAEVKKPGSSVKVSCKASGTDFDKIYIHWVRQAP |
| | | GQGLEWMGRISAGSGNVKYNEKFKGRVTITADTSTSTAYME |
| | | LSSLRSEDTAVYYCAGSYYSYDVLDYWGQGTTVTVSS |

A-H.5

| | | |
|---|---|---|
| SEQ ID NO: 86 | VH + VL | QVQLVQSGAEVKKPGSSVKVSCKASGHDFRDFYIHWVRQAP |
| | | GQGLEWMGRVYPGSGSYRYNEKFKGRVTITADTSTSTAYME |
| | | LSSLRSEDTAVYYCAGSYYSYDVLDYWGQGTTVTVSSGGGG |
| | | SGGGGSGGGGSGGGGSDIQMTQSPSFLSASVGDRVTITCKAS |
| | | QNVDDRVAWYQQKPGKAPKALIYSSSHRYKGVPSRFSGSGS |
| | | GTEFTLTISSLQPEDFATYFCQQFKSYPLTFGQGTKLEIK |
| SEQ ID NO: 87 | VL | DIQMTQSPSFLSASVGDRVTITCKASQNVDDRVAWYQQKPG |
| | | KAPKALIYSSSHRYKGVPSRFSGSGSGTEFTLTISSLQPEDFAT |
| | | YFCQQFKSYPLTFGQGTKLEIK |
| SEQ ID NO: 88 | VH | QVQLVQSGAEVKKPGSSVKVSCKASGHDFRDFYIHWVRQAP |
| | | GQGLEWMGRVYPGSGSYRYNEKFKGRVTITADTSTSTAYME |
| | | LSSLRSEDTAVYYCAGSYYSYDVLDYWGQGTTVTVSS |

A-H.6

| | | |
|---|---|---|
| SEQ ID NO: 89 | VH + VL | QVQLVQSGAEVKKPGSSVKVSCKASGHDFKLTYIHWVRQAP |
| | | GQGLEWMGRISAGSGNVKYNEKFKGRVTITADTSTSTAYME |
| | | LSSLRSEDTAVYYCAGSYYSYDVLDYWGQGTTVTVSSGGGG |
| | | SGGGGSGGGGSGGGGSDIQMTQSPSFLSASVGDRVTITCKAS |
| | | QNVDNRVAWYQQKPGKAPKALIYSSSHRYKGVPSRFSGSGS |
| | | GTEFTLTISSLQPEDFATYFCQQFKSYPLTFGQGTKLEIK |
| SEQ ID NO: 90 | VL | DIQMTQSPSFLSASVGDRVTITCKASQNVDNRVAWYQQKPG |
| | | KAPKALIYSSSHRYKGVPSRFSGSGSGTEFTLTISSLQPEDFAT |
| | | YFCQQFKSYPLTFGQGTKLEIK |
| SEQ ID NO: 91 | VH | QVQLVQSGAEVKKPGSSVKVSCKASGHDFKLTYIHWVRQAP |
| | | GQGLEWMGRISAGSGNVKYNEKFKGRVTITADTSTSTAYME |
| | | LSSLRSEDTAVYYCAGSYYSYDVLDYWGQGTTVTVSS |

A-H.7

| | | |
|---|---|---|
| SEQ ID NO: 92 | VH + VL | QVQLVQSGAEVKKPGSSVKVSCKASGTDFKLTYIHWVRQAP |
| | | GQGLEWMGRIFPGSGNVKYNEKFKGRVTITADTSTSTAYME |
| | | LSSLRSEDTAVYYCAGSYYSYDVLDYWGQGTTVTVSSGGGG |
| | | SGGGGSGGGGSGGGGSDIQMTQSPSFLSASVGDRVTITCKAS |
| | | QNVENKVAWHQQKPGKAPKALIYSSSHRYKGVPSRFSGSGS |
| | | GTEFTLTISSLQPEDFATYFCQQFKSYPLTFGQGTKLEIK |
| SEQ ID NO: 93 | VL | DIQMTQSPSFLSASVGDRVTITCKASQNVENKVAWHQQKPG |
| | | KAPKALIYSSSHRYKGVPSRFSGSGSGTEFTLTISSLQPEDFAT |
| | | YFCQQFKSYPLTFGQGTKLEIK |
| SEQ ID NO: 94 | VH | QVQLVQSGAEVKKPGSSVKVSCKASGTDFKLTYIHWVRQAP |
| | | GQGLEWMGRIFPGSGNVKYNEKFKGRVTITADTSTSTAYME |
| | | LSSLRSEDTAVYYCAGSYYSYDVLDYWGQGTTVTVSS |

A-H.8

| | | |
|---|---|---|
| SEQ ID NO: 95 | VH + VL | QVQLVQSGAEVKKPGSSVKVSCKASGTDFDKIYIHWVRQAP |
| | | GQGLEWMGRIFAGSGNTKYNEKFKGRVTITADTSTSTAYME |
| | | LSSLRSEDTAVYYCAGSYYSYDVLDYWGQGTTVTVSSGGGG |
| | | SGGGGSGGGGSGGGGSDIQMTQSPSFLSASVGDRVTITCKAS |
| | | QNVDDRVAWYQQKPGKAPKALIYSSSHRYKGVPSRFSGSGS |
| | | GTEFTLTISSLQPEDFATYFCQQFKSYPLTFGQGTKLEIK |
| SEQ ID NO: 96 | VL | DIQMTQSPSFLSASVGDRVTITCKASQNVDDRVAWYQQKPG |
| | | KAPKALIYSSSHRYKGVPSRFSGSGSGTEFTLTISSLQPEDFAT |
| | | YFCQQFKSYPLTFGQGTKLEIK |
| SEQ ID NO: 97 | VH | QVQLVQSGAEVKKPGSSVKVSCKASGTDFDKIYIHWVRQAP |
| | | GQGLEWMGRIFAGSGNTKYNEKFKGRVTITADTSTSTAYME |
| | | LSSLRSEDTAVYYCAGSYYSYDVLDYWGQGTTVTVSS |

A-H.9

| | | |
|---|---|---|
| SEQ ID NO: 98 | VH + VL | QVQLVQSGAEVKKPGSSVKVSCKASGHDFDKFYIHWVRQAP |
| | | GQGLEWMGRVSAGSGNVKYNEKFKGRVTITADTSTSTAYME |
| | | LSSLRSEDTAVYYCAGSYYSYDVLDYWGQGTTVTVSSGGGG |
| | | SGGGGSGGGGSGGGGSDIQMTQSPSFLSASVGDRVTITCKAS |
| | | QNVGNRVAWYQQKPGKAPKALIYSSSHRYSGVPSRFSGSGS |
| | | GTEFTLTISSLQPEDFATYFCQQFKSYPLTFGQGTKLEIK |
| SEQ ID NO: 99 | VL | DIQMTQSPSFLSASVGDRVTITCKASQNVGNRVAWYQQKPG |
| | | KAPKALIYSSSHRYSGVPSRFSGSGSGTEFTLTISSLQPEDFAT |
| | | YFCQQFKSYPLTFGQGTKLEIK |
| SEQ ID NO: | VH | QVQLVQSGAEVKKPGSSVKVSCKASGHDFDKFYIHWVRQAP |
| 100 | | GQGLEWMGRVSAGSGNVKYNEKFKGRVTITADTSTSTAYME |
| | | LSSLRSEDTAVYYCAGSYYSYDVLDYWGQGTTVTVSS |

A-H.10

| | | |
|---|---|---|
| SEQ ID NO: | VH + VL | QVQLVQSGAEVKKPGSSVKVSCKASGHDFDKFYIHWVRQAP |
| 101 | | GQGLEWMGRIFAGSGNVKYNEKFKGRVTITADTSTSTAYME |
| | | LSSLRSEDTAVYYCAGSYYSYDVLDYWGQGTTVTVSSGGGG |
| | | SGGGGSGGGGSGGGGSDIQMTQSPSFLSASVGDRVTITCKAS |
| | | QNVGDRVAWYQQKPGKAPKALIYSSSHRYKGVPSRFSGSGS |
| | | GTEFTLTISSLQPEDFATYFCQQFKSYPLTFGQGTKLEIKs |
| SEQ ID NO: | VL | DIQMTQSPSFLSASVGDRVTITCKASQNVGDRVAWYQQKPG |
| 102 | | KAPKALIYSSSHRYKGVPSRFSGSGSGTEFTLTISSLQPEDFAT |
| | | YFCQQFKSYPLTFGQGTKLEIK |
| SEQ ID NO: | VH | QVQLVQSGAEVKKPGSSVKVSCKASGHDFDKFYIHWVRQAP |
| 103 | | GQGLEWMGRIFAGSGNVKYNEKFKGRVTITADTSTSTAYME |
| | | LSSLRSEDTAVYYCAGSYYSYDVLDYWGQGTTVTVSS |

A-H.11

| | | |
|---|---|---|
| SEQ ID NO: | VH + VL | QVQLVQSGAEVKKPGSSVKVSCKASGTDFKLTYIHWVRQAP |
| 104 | | GQGLEWMGRVSPGSGNVKYNEKFKGRVTITADTSTSTAYME |
| | | LSSLRSEDTAVYYCAGSYYSYDVLDYWGQGTTVTVSSGGGG |
| | | SGGGGSGGGGSGGGGSDIQMTQSPSFLSASVGDRVTITCKAS |
| | | QNVGDRVAWYQQKPGKAPKALIYSSSHRYKGVPSRFSGSGS |
| | | GTEFTLTISSLQPEDFATYFCQQFKSYPLTFGQGTKLEIK |
| SEQ ID NO: | VL | DIQMTQSPSFLSASVGDRVTITCKASQNVGDRVAWYQQKPG |
| 105 | | KAPKALIYSSSHRYKGVPSRFSGSGSGTEFTLTISSLQPEDFAT |
| | | YFCQQFKSYPLTFGQGTKLEIK |
| SEQ ID NO: | VH | QVQLVQSGAEVKKPGSSVKVSCKASGTDFKLTYIHWVRQAP |
| 106 | | GQGLEWMGRVSPGSGNVKYNEKFKGRVTITADTSTSTAYME |
| | | LSSLRSEDTAVYYCAGSYYSYDVLDYWGQGTTVTVSS |

A-H.12

| | | |
|---|---|---|
| SEQ ID NO: | VH + VL | QVQLVQSGAEVKKPGSSVKVSCKASGTDFDKIYIHWVRQAP |
| 107 | | GQGLEWMGRVSAGSGNTKYNEKFKGRVTITADTSTSTAYME |
| | | LSSLRSEDTAVYYCAGSYYSYDVLDYWGQGTTVTVSSGGGG |
| | | SGGGGSGGGGSGGGGSDIQMTQSPSFLSASVGDRVTITCKAS |
| | | QNVGNRVAWYQQKPGKAPKALIYSSSHRYKGVPSRFSGSGS |
| | | GTEFTLTISSLQPEDFATYFCQQFKSYPLTFGQGTKLEIK |
| SEQ ID NO: | VL | DIQMTQSPSFLSASVGDRVTITCKASQNVGNRVAWYQQKPG |
| 108 | | KAPKALIYSSSHRYKGVPSRFSGSGSGTEFTLTISSLQPEDFAT |
| | | YFCQQFKSYPLTFGQGTKLEIK |
| SEQ ID NO: | VH | QVQLVQSGAEVKKPGSSVKVSCKASGTDFDKIYIHWVRQAP |
| 109 | | GQGLEWMGRVSAGSGNTKYNEKFKGRVTITADTSTSTAYME |
| | | LSSLRSEDTAVYYCAGSYYSYDVLDYWGQGTTVTVSS |

A-H.13, also referred to as A-H.69

| | | |
|---|---|---|
| SEQ ID NO: | VH + VL | QVQLVQSGAEVKKPGSSVKVSCKASGTDFKLTYIHWVRQAP |
| 110 | | GQGLEWMGRIFPGSGNVKYNEKFKGRVTITADTSTSTAYME |
| | | LSSLRSEDTAVYYCAGSYYSYDVLDYWGQGTTVTVSSGGGG |
| | | SGGGGSGGGGSGGGGSDIQMTQSPSFLSASVGDRVTITCKAS |
| | | QNVDNRVAWYQQKPGKAPKALIYSSSHRYKGVPSRFSGSGS |
| | | GTEFTLTISSLQPEDFATYFCQQFKSYPLTFGQGTKLEIK |
| SEQ ID NO: | VL | DIQMTQSPSFLSASVGDRVTITCKASQNVDNRVAWYQQKPG |
| 111 | | KAPKALIYSSSHRYKGVPSRFSGSGSGTEFTLTISSLQPEDFAT |
| | | YFCQQFKSYPLTFGQGTKLEIK |
| SEQ ID NO: | VH | QVQLVQSGAEVKKPGSSVKVSCKASGTDFKLTYIHWVRQAP |
| 112 | | GQGLEWMGRIFPGSGNVKYNEKFKGRVTITADTSTSTAYME |
| | | LSSLRSEDTAVYYCAGSYYSYDVLDYWGQGTTVTVSS |

A-H.14

| | | |
|---|---|---|
| SEQ ID NO: | VH + VL | QVQLVQSGAEVKKPGSSVKVSCKASGTDFDKIYIHWVRQAP |
| 113 | | GQGLEWMGRISAGSGNTKYNEKFKGRVTITADTSTSTAYME |
| | | LSSLRSEDTAVYYCAGSYYSYDVLDYWGQGTTVTVSSGGGG |
| | | SGGGGSGGGGSGGGGSDIQMTQSPSFLSASVGDRVTITCKAS |
| | | QNVDDRVAWYQQKPGKAPKALIYSSSHRYKGVPSRFSGSGS |
| | | GTEFTLTISSLQPEDFATYFCQQFKSYPLTFGQGTKLEIK |
| SEQ ID NO: | VL | DIQMTQSPSFLSASVGDRVTITCKASQNVDDRVAWYQQKPG |
| 114 | | KAPKALIYSSSHRYKGVPSRFSGSGSGTEFTLTISSLQPEDFAT |
| | | YFCQQFKSYPLTFGQGTKLEIK |
| SEQ ID NO: | VH | QVQLVQSGAEVKKPGSSVKVSCKASGTDFDKIYIHWVRQAP |
| 115 | | GQGLEWMGRISAGSGNTKYNEKFKGRVTITADTSTSTAYME |
| | | LSSLRSEDTAVYYCAGSYYSYDVLDYWGQGTTVTVSS |

A-H.15

| | | |
|---|---|---|
| SEQ ID NO: | VH + VL | QVQLVQSGAEVKKPGSSVKVSCKASGTDFRLTYIHWVRQAP |
| 116 | | GQGLEWMGRVSPGSGNTKYNEKFKGRVTITADTSTSTAYME |
| | | LSSLRSEDTAVYYCAGSYYSYDVLDYWGQGTTVTVSSGGGG |
| | | SGGGGSGGGGSGGGGSDIQMTQSPSFLSASVGDRVTITCKAS |
| | | QNVDNKVAWHQQKPGKAPKALIYSSSHRYKGVPSRFSGSGS |
| | | GTEFTLTISSLQPEDFATYFCQQFKSYPLTFGQGTKLEIK |
| SEQ ID NO: | VL | DIQMTQSPSFLSASVGDRVTITCKASQNVDNKVAWHQQKPG |
| 117 | | KAPKALIYSSSHRYKGVPSRFSGSGSGTEFTLTISSLQPEDFAT |
| | | YFCQQFKSYPLTFGQGTKLEIK |
| SEQ ID NO: | VH | QVQLVQSGAEVKKPGSSVKVSCKASGTDFRLTYIHWVRQAP |
| 118 | | GQGLEWMGRVSPGSGNTKYNEKFKGRVTITADTSTSTAYME |
| | | LSSLRSEDTAVYYCAGSYYSYDVLDYWGQGTTVTVSS |

A-H.16

| | | |
|---|---|---|
| SEQ ID NO: | VH + VL | QVQLVQSGAEVKKPGSSVKVSCKASGGTFRLTYIHWVRQAP |
| 119 | | GQGLEWMGRVYPGSGNTKYNEKFKGRVTITADTSTSTAYME |
| | | LSSLRSEDTAVYYCAGSYYSYDVLDYWGQGTTVTVSSGGGG |
| | | SGGGGSGGGGSGGGGSDIQMTQSPSFLSASVGDRVTITCKAS |
| | | QNVDDRVAWYQQKPGKAPKALIYSSSHRYKGVPSRFSGSGS |
| | | GTEFTLTISSLQPEDFATYFCQQFKSYPLTFGQGTKLEIK |
| SEQ ID NO: | VL | DIQMTQSPSFLSASVGDRVTITCKASQNVDDRVAWYQQKPG |
| 120 | | KAPKALIYSSSHRYKGVPSRFSGSGSGTEFTLTISSLQPEDFAT |
| | | YFCQQFKSYPLTFGQGTKLEIK |
| SEQ ID NO: | VH | QVQLVQSGAEVKKPGSSVKVSCKASGGTFRLTYIHWVRQAP |
| 121 | | GQGLEWMGRVYPGSGNTKYNEKFKGRVTITADTSTSTAYME |
| | | LSSLRSEDTAVYYCAGSYYSYDVLDYWGQGTTVTVSS |

A-H.17

| | | |
|---|---|---|
| SEQ ID NO: | VH + VL | QVQLVQSGAEVKKPGSSVKVSCKASGTDFRLTYIHWVRQAP |
| 122 | | GQGLEWMGRIFPGSGNTKYNEKFKGRVTITADTSTSTAYMEL |
| | | SSLRSEDTAVYYCAGSYYSYDVLDYWGQGTTVTVSSGGGGS |
| | | GGGGSGGGGSGGGGSDIQMTQSPSFLSASVGDRVTITCKASQ |
| | | NVDDRVAWYQQKPGKAPKALIYSSSHRYKGVPSRFSGSGSG |
| | | TEFTLTISSLQPEDFATYFCQQFKSYPLTFGQGTKLEIK |
| SEQ ID NO: | VL | DIQMTQSPSFLSASVGDRVTITCKASQNVDDRVAWYQQKPG |
| 123 | | KAPKALIYSSSHRYKGVPSRFSGSGSGTEFTLTISSLQPEDFAT |
| | | YFCQQFKSYPLTFGQGTKLEIK |
| SEQ ID NO: | VH | QVQLVQSGAEVKKPGSSVKVSCKASGTDFRLTYIHWVRQAP |
| 124 | | GQGLEWMGRIFPGSGNTKYNEKFKGRVTITADTSTSTAYMEL |
| | | SSLRSEDTAVYYCAGSYYSYDVLDYWGQGTTVTVSS |

A-H.18

| | | |
|---|---|---|
| SEQ ID NO: | VH + VL | QVQLVQSGAEVKKPGSSVKVSCKASGTDFKLTYIHWVRQAP |
| 125 | | GQGLEWMGRIFPGSGNVKYNEKFKGRVTITADTSTSTAYME |
| | | LSSLRSEDTAVYYCAGSYYSYDVLDYWGQGTTVTVSSGGGG |
| | | SGGGGSGGGGSGGGGSDIQMTQSPSFLSASVGDRVTITCKAS |
| | | QNVEDRVAWYQQKPGKAPKALIYSSSHRYKGVPSRFSGSGS |
| | | GTEFTLTISSLQPEDFATYFCQQFKSYPLTFGQGTKLEIK |
| SEQ ID NO: | VL | DIQMTQSPSFLSASVGDRVTITCKASQNVEDRVAWYQQKPG |
| 126 | | KAPKALIYSSSHRYKGVPSRFSGSGSGTEFTLTISSLQPEDFAT |
| | | YFCQQFKSYPLTFGQGTKLEIK |
| SEQ ID NO: | VH | QVQLVQSGAEVKKPGSSVKVSCKASGTDFKLTYIHWVRQAP |
| 127 | | GQGLEWMGRIFPGSGNVKYNEKFKGRVTITADTSTSTAYME |
| | | LSSLRSEDTAVYYCAGSYYSYDVLDYWGQGTTVTVSS |

A-H.19

| | | |
|---|---|---|
| SEQ ID NO: | VH + VL | QVQLVQSGAEVKKPGSSVKVSCKASGGTFRLTYIHWVRQAP |
| 128 | | GQGLEWMGRISAGSGNVKYNEKFKGRVTITADTSTSTAYME |
| | | LSSLRSEDTAVYYCAGSYYSYDVLDYWGQGTTVTVSSGGGG |
| | | SGGGGSGGGGSGGGGSDIQMTQSPSFLSASVGDRVTITCKAS |
| | | QNVGDRVAWYQQKPGKAPKALIYSSSHRYKGVPSRFSGSGS |
| | | GTEFTLTISSLQPEDFATYFCQQFKSYPLTFGQGTKLEIK |
| SEQ ID NO: | VL | DIQMTQSPSFLSASVGDRVTITCKASQNVGDRVAWYQQKPG |
| 129 | | KAPKALIYSSSHRYKGVPSRFSGSGSGTEFTLTISSLQPEDFAT |
| | | YFCQQFKSYPLTFGQGTKLEIK |
| SEQ ID NO: | VH | QVQLVQSGAEVKKPGSSVKVSCKASGGTFRLTYIHWVRQAP |
| 130 | | GQGLEWMGRISAGSGNVKYNEKFKGRVTITADTSTSTAYME |
| | | LSSLRSEDTAVYYCAGSYYSYDVLDYWGQGTTVTVSS |

A-H.20

| | | |
|---|---|---|
| SEQ ID NO: | VH + VL | QVQLVQSGAEVKKPGSSVKVSCKASGGTFDKTYIHWVRQAP |
| 131 | | GQGLEWMGRISAGSGNTKYNEKFKGRVTITADTSTSTAYME |
| | | LSSLRSEDTAVYYCAGSYYSYDVLDYWGQGTTVTVSSGGGG |
| | | SGGGGSGGGGSGGGGSDIQMTQSPSFLSASVGDRVTITCKAS |
| | | QNVDDRVAWYQQKPGKAPKALIYSSSHRYKGVPSRFSGSGS |
| | | GTEFTLTISSLQPEDFATYFCQQFKSYPLTFGQGTKLEIK |
| SEQ ID NO: | VL | DIQMTQSPSFLSASVGDRVTITCKASQNVDDRVAWYQQKPG |
| 132 | | KAPKALIYSSSHRYKGVPSRFSGSGSGTEFTLTISSLQPEDFAT |
| | | YFCQQFKSYPLTFGQGTKLEIK |
| SEQ ID NO: | VH | QVQLVQSGAEVKKPGSSVKVSCKASGGTFDKTYIHWVRQAP |
| 133 | | GQGLEWMGRISAGSGNTKYNEKFKGRVTITADTSTSTAYME |
| | | LSSLRSEDTAVYYCAGSYYSYDVLDYWGQGTTVTVSS |

A-H.21

| | | |
|---|---|---|
| SEQ ID NO: | VH + VL | QVQLVQSGAEVKKPGSSVKVSCKASGHDFDKFYIHWVRQAP |
| 134 | | GQGLEWMGRISAGSGNTKYNEKFKGRVTITADTSTSTAYME |
| | | LSSLRSEDTAVYYCAGSYYSYDVLDYWGQGTTVTVSSGGGG |
| | | SGGGGSGGGGSGGGGSDIQMTQSPSFLSASVGDRVTITCKAS |
| | | QNVDDRVAWYQQKPGKAPKALIYSSSHRYKGVPSRFSGSGS |
| | | GTEFTLTISSLQPEDFATYFCQQFKSYPLTFGQGTKLEIK |
| SEQ ID NO: | VL | DIQMTQSPSFLSASVGDRVTITCKASQNVDDRVAWYQQKPG |
| 135 | | KAPKALIYSSSHRYKGVPSRFSGSGSGTEFTLTISSLQPEDFAT |
| | | YFCQQFKSYPLTFGQGTKLEIK |
| SEQ ID NO: | VH | QVQLVQSGAEVKKPGSSVKVSCKASGHDFDKFYIHWVRQAP |
| 136 | | GQGLEWMGRISAGSGNTKYNEKFKGRVTITADTSTSTAYME |
| | | LSSLRSEDTAVYYCAGSYYSYDVLDYWGQGTTVTVSS |

A-H.22

| | | |
|---|---|---|
| SEQ ID NO: | VH + VL | QVQLVQSGAEVKKPGSSVKVSCKASGTDFKLTYIHWVRQAP |
| 137 | | GQGLEWMGRISAGSGNVKYNEKFKGRVTITADTSTSTAYME |
| | | LSSLRSEDTAVYYCAGSYYSYDVLDYWGQGTTVTVSSGGGG |
| | | SGGGGSGGGGSGGGGSDIQMTQSPSFLSASVGDRVTITCKAS |
| | | QNVDNKVAWHQQKPGKAPKALIYSSSHRYKGVPSRFSGSGS |
| | | GTEFTLTISSLQPEDFATYFCQQFKSYPLTFGQGTKLEIK |
| SEQ ID NO: | VL | DIQMTQSPSFLSASVGDRVTITCKASQNVDNKVAWHQQKPG |
| 138 | | KAPKALIYSSSHRYKGVPSRFSGSGSGTEFTLTISSLQPEDFAT |
| | | YFCQQFKSYPLTFGQGTKLEIK |
| SEQ ID NO: | VH | QVQLVQSGAEVKKPGSSVKVSCKASGTDFKLTYIHWVRQAP |
| 139 | | GQGLEWMGRISAGSGNVKYNEKFKGRVTITADTSTSTAYME |
| | | LSSLRSEDTAVYYCAGSYYSYDVLDYWGQGTTVTVSS |

A-H.23

| | | |
|---|---|---|
| SEQ ID NO: | VH + VL | QVQLVQSGAEVKKPGSSVKVSCKASGHDFRLTYIHWVRQAP |
| 140 | | GQGLEWMGRISAGSGNVKYNEKFKGRVTITADTSTSTAYME |
| | | LSSLRSEDTAVYYCAGSYYSYDVLDYWGQGTTVTVSSGGGG |
| | | SGGGGSGGGGSGGGGSDIQMTQSPSFLSASVGDRVTITCKAS |
| | | QNVADRVAWYQQKPGKAPKALIYSSSHRYKGVPSRFSGSGS |
| | | GTEFTLTISSLQPEDFATYFCQQFKSYPLTFGQGTKLEIK |
| SEQ ID NO: | VL | DIQMTQSPSFLSASVGDRVTITCKASQNVADRVAWYQQKPG |
| 141 | | KAPKALIYSSSHRYKGVPSRFSGSGSGTEFTLTISSLQPEDFAT |
| | | YFCQQFKSYPLTFGQGTKLEIK |
| SEQ ID NO: | VH | QVQLVQSGAEVKKPGSSVKVSCKASGHDFRLTYIHWVRQAP |
| 142 | | GQGLEWMGRISAGSGNVKYNEKFKGRVTITADTSTSTAYME |
| | | LSSLRSEDTAVYYCAGSYYSYDVLDYWGQGTTVTVSS |

A-H.24

| | | |
|---|---|---|
| SEQ ID NO: | VH + VL | QVQLVQSGAEVKKPGSSVKVSCKASGHDFHLWYIHWVRQA |
| 143 | | PGQGLEWMGRVSAGSGNVKYNEKFKGRVTITADTSTSTAYM |
| | | ELSSLRSEDTAVYYCAGSYYSYDVLDYWGQGTTVTVSSGGG |
| | | GSGGGGSGGGGSGGGGSDIQMTQSPSFLSASVGDRVTITCKA |
| | | SQNVDNKVAWHQQKPGKAPKALIYSSSHRYKGVPSRFSGSG |
| | | SGTEFTLTISSLQPEDFATYFCQQFKSYPLTFGQGTKLEIK |
| SEQ ID NO: | VL | DIQMTQSPSFLSASVGDRVTITCKASQNVDNKVAWHQQKPG |
| 144 | | KAPKALIYSSSHRYKGVPSRFSGSGSGTEFTLTISSLQPEDFAT |
| | | YFCQQFKSYPLTFGQGTKLEIK |
| SEQ ID NO: | VH | QVQLVQSGAEVKKPGSSVKVSCKASGHDFHLWYIHWVRQA |
| 145 | | PGQGLEWMGRVSAGSGNVKYNEKFKGRVTITADTSTSTAYM |
| | | ELSSLRSEDTAVYYCAGSYYSYDVLDYWGQGTTVTVSS |

A-H.25

| | | |
|---|---|---|
| SEQ ID NO: | VH + VL | QVQLVQSGAEVKKPGSSVKVSCKASGHDFHLWYIHWVRQA |
| 146 | | PGQGLEWMGRVFAGSGNTKYNEKFKGRVTITADTSTSTAYM |
| | | ELSSLRSEDTAVYYCAGSYYSYDVLDYWGQGTTVTVSSGGG |
| | | GSGGGGSGGGGSGGGGSDIQMTQSPSFLSASVGDRVTITCKA |
| | | SQNVEDKVAWYQQKPGKAPKALIYSSSHRYKGVPSRFSGSG |
| | | SGTEFTLTISSLQPEDFATYFCQQFKSYPLTFGQGTKLEIK |
| SEQ ID NO: | VL | DIQMTQSPSFLSASVGDRVTITCKASQNVEDKVAWYQQKPG |
| 147 | | KAPKALIYSSSHRYKGVPSRFSGSGSGTEFTLTISSLQPEDFAT |
| | | YFCQQFKSYPLTFGQGTKLEIK |
| SEQ ID NO: | VH | QVQLVQSGAEVKKPGSSVKVSCKASGHDFHLWYIHWVRQA |
| 148 | | PGQGLEWMGRVFAGSGNTKYNEKFKGRVTITADTSTSTAYM |
| | | ELSSLRSEDTAVYYCAGSYYSYDVLDYWGQGTTVTVSS |

A-H.26

| | | |
|---|---|---|
| SEQ ID NO: | VH + VL | QVQLVQSGAEVKKPGSSVKVSCKASGTDFKLTYIHWVRQAP |
| 149 | | GQGLEWMGRIFPGSGNTKYNEKFKGRVTITADTSTSTAYMEL |
| | | SSLRSEDTAVYYCAGSYYSYDVLDYWGQGTTVTVSSGGGGS |
| | | GGGGSGGGGSGGGGSDIQMTQSPSFLSASVGDRVTITCKASQ |
| | | NVDDRVAWYQQKPGKAPKALIYSSSHRYKGVPSRFSGSGSG |
| | | TEFTLTISSLQPEDFATYFCQQFKSYPLTFGQGTKLEIK |
| SEQ ID NO: | VL | DIQMTQSPSFLSASVGDRVTITCKASQNVDDRVAWYQQKPG |
| 150 | | KAPKALIYSSSHRYKGVPSRFSGSGSGTEFTLTISSLQPEDFAT |
| | | YFCQQFKSYPLTFGQGTKLEIK |
| SEQ ID NO: | VH | QVQLVQSGAEVKKPGSSVKVSCKASGTDFKLTYIHWVRQAP |
| 151 | | GQGLEWMGRIFPGSGNTKYNEKFKGRVTITADTSTSTAYMEL |
| | | SSLRSEDTAVYYCAGSYYSYDVLDYWGQGTTVTVSS |

A-H.27

| | | |
|---|---|---|
| SEQ ID NO: | VH + VL | QVQLVQSGAEVKKPGSSVKVSCKASGTDFKLTYIHWVRQAP |
| 153 | | GQGLEWMGRVSAGSGNVKYNEKFKGRVTITADTSTSTAYME |
| | | LSSLRSEDTAVYYCAGSYYSYDVLDYWGQGTTVTVSSGGGG |
| | | SGGGGSGGGGSGGGGSDIQMTQSPSFLSASVGDRVTITCKAS |
| | | QNVGNRVAWYQQKPGKAPKALIYSSSHRYKGVPSRFSGSGS |
| | | GTEFTLTISSLQPEDFATYFCQQFKSYPLTFGQGTKLEIK |
| SEQ ID NO: | VL | DIQMTQSPSFLSASVGDRVTITCKASQNVGNRVAWYQQKPG |
| 154 | | KAPKALIYSSSHRYKGVPSRFSGSGSGTEFTLTISSLQPEDFAT |
| | | YFCQQFKSYPLTFGQGTKLEIK |
| SEQ ID NO: | VH | QVQLVQSGAEVKKPGSSVKVSCKASGTDFKLTYIHWVRQAP |
| 155 | | GQGLEWMGRVSAGSGNVKYNEKFKGRVTITADTSTSTAYME |
| | | LSSLRSEDTAVYYCAGSYYSYDVLDYWGQGTTVTVSS |

A-H.28

| | | |
|---|---|---|
| SEQ ID NO: | VH + VL | QVQLVQSGAEVKKPGSSVKVSCKASGTDFKLTYIHWVRQAP |
| 156 | | GQGLEWMGRISPGSGNTKYNEKFKGRVTITADTSTSTAYMEL |
| | | SSLRSEDTAVYYCAGSYYSYDVLDYWGQGTTVTVSSGGGGS |
| | | GGGGSGGGGSGGGGSDIQMTQSPSFLSASVGDRVTITCKASQ |
| | | NVGDRVAWYQQKPGKAPKALIYSSSHRYKGVPSRFSGSGSG |
| | | TEFTLTISSLQPEDFATYFCQQFKSYPLTFGQGTKLEIK |
| SEQ ID NO: | VL | DIQMTQSPSFLSASVGDRVTITCKASQNVGDRVAWYQQKPG |
| 157 | | KAPKALIYSSSHRYKGVPSRFSGSGSGTEFTLTISSLQPEDFAT |
| | | YFCQQFKSYPLTFGQGTKLEIK |
| SEQ ID NO: | VH | QVQLVQSGAEVKKPGSSVKVSCKASGTDFKLTYIHWVRQAP |
| 158 | | GQGLEWMGRISPGSGNTKYNEKFKGRVTITADTSTSTAYMEL |
| | | SSLRSEDTAVYYCAGSYYSYDVLDYWGQGTTVTVSS |

A-H.29

| | | |
|---|---|---|
| SEQ ID NO: | VH + VL | QVQLVQSGAEVKKPGSSVKVSCKASGHDFHLWYIHWVRQA |
| 159 | | PGQGLEWMGRISPGSGNVKYNEKFKGRVTITADTSTSTAYME |
| | | LSSLRSEDTAVYYCAGSYYSYDVLDYWGQGTTVTVSSGGGG |
| | | SGGGGSGGGGSGGGGSDIQMTQSPSFLSASVGDRVTITCKAS |
| | | QNVGDRVAWHQQKPGKAPKALIYSSSHRYKGVPSRFSGSGS |
| | | GTEFTLTISSLQPEDFATYFCQQFKSYPLTFGQGTKLEIK |
| SEQ ID NO: | VL | DIQMTQSPSFLSASVGDRVTITCKASQNVGDRVAWHQQKPG |
| 160 | | KAPKALIYSSSHRYKGVPSRFSGSGSGTEFTLTISSLQPEDFAT |
| | | YFCQQFKSYPLTFGQGTKLEIK |
| SEQ ID NO: | VH | QVQLVQSGAEVKKPGSSVKVSCKASGHDFHLWYIHWVRQA |
| 161 | | PGQGLEWMGRISPGSGNVKYNEKFKGRVTITADTSTSTAYME |
| | | LSSLRSEDTAVYYCAGSYYSYDVLDYWGQGTTVTVSS |

A-H.31

| | | |
|---|---|---|
| SEQ ID NO: | VH + VL | QVQLVQSGAEVKKPGSSVKVSCKASGHDFKLTYIHWVRQAP |
| 162 | | GQGLEWMGRISAGSGNVKYNEKFKGRVTITADTSTSTAYME |
| | | LSSLRSEDTAVYYCAGSYYSYDVLDYWGQGTTVTVSSGGGG |
| | | SGGGGSGGGGSGGGGSDIQMTQSPSFLSASVGDRVTITCKAS |
| | | QNVDDRVAWYQQKPGKAPKALIYSSSHRYKGVPSRFSGSGS |
| | | GTEFTLTISSLQPEDFATYFCQQFKSYPLTFGQGTKLEIK |
| SEQ ID NO: | VL | DIQMTQSPSFLSASVGDRVTITCKASQNVDDRVAWYQQKPG |
| 163 | | KAPKALIYSSSHRYKGVPSRFSGSGSGTEFTLTISSLQPEDFAT |
| | | YFCQQFKSYPLTFGQGTKLEIK |
| SEQ ID NO: | VH | QVQLVQSGAEVKKPGSSVKVSCKASGHDFKLTYIHWVRQAP |
| 164 | | GQGLEWMGRISAGSGNVKYNEKFKGRVTITADTSTSTAYME |
| | | LSSLRSEDTAVYYCAGSYYSYDVLDYWGQGTTVTVSS |

A-H.31

| | | |
|---|---|---|
| SEQ ID NO: | VH + VL | QVQLVQSGAEVKKPGSSVKVSCKASGTDFHLWYIHWVRQAP |
| 165 | | GQGLEWMGRVFAGSGSYRYNEKFKGRVTITADTSTSTAYME |
| | | LSSLRSEDTAVYYCAGSYYSYDVLDYWGQGTTVTVSSGGGG |
| | | SGGGGSGGGGSGGGGSDIQMTQSPSFLSASVGDRVTITCKAS |
| | | QNVDDRVAWYQQKPGKAPKALIYSSSHRYKGVPSRFSGSGS |
| | | GTEFTLTISSLQPEDFATYFCQQFKSYPLTFGQGTKLEIK |
| SEQ ID NO: | VL | DIQMTQSPSFLSASVGDRVTITCKASQNVDDRVAWYQQKPG |
| 166 | | KAPKALIYSSSHRYKGVPSRFSGSGSGTEFTLTISSLQPEDFAT |
| | | YFCQQFKSYPLTFGQGTKLEIK |
| SEQ ID NO: | VH | QVQLVQSGAEVKKPGSSVKVSCKASGTDFHLWYIHWVRQAP |
| 167 | | GQGLEWMGRVFAGSGSYRYNEKFKGRVTITADTSTSTAYME |
| | | LSSLRSEDTAVYYCAGSYYSYDVLDYWGQGTTVTVSS |

A-H.32

| | | |
|---|---|---|
| SEQ ID NO: | VH + VL | QVQLVQSGAEVKKPGSSVKVSCKASGTDFDKIYIHWVRQAP |
| 168 | | GQGLEWMGRISAGSGNTKYNEKFKGRVTITADTSTSTAYME |
| | | LSSLRSEDTAVYYCAGSYYSYDVLDYWGQGTTVTVSSGGGG |
| | | SGGGGSGGGGSGGGGSDIQMTQSPSFLSASVGDRVTITCKAS |
| | | QNVADRVAWYQQKPGKAPKALIYSSSHRYKGVPSRFSGSGS |
| | | GTEFTLTISSLQPEDFATYFCQQFKSYPLTFGQGTKLEIK |
| SEQ ID NO: | VL | DIQMTQSPSFLSASVGDRVTITCKASQNVADRVAWYQQKPG |
| 169 | | KAPKALIYSSSHRYKGVPSRFSGSGSGTEFTLTISSLQPEDFAT |
| | | YFCQQFKSYPLTFGQGTKLEIK |
| SEQ ID NO: | VH | QVQLVQSGAEVKKPGSSVKVSCKASGTDFDKIYIHWVRQAP |
| 170 | | GQGLEWMGRISAGSGNTKYNEKFKGRVTITADTSTSTAYME |
| | | LSSLRSEDTAVYYCAGSYYSYDVLDYWGQGTTVTVSS |

A-H.33

| | | |
|---|---|---|
| SEQ ID NO: | VH + VL | QVQLVQSGAEVKKPGSSVKVSCKASGTDFKLTYIHWVRQAP |
| 171 | | GQGLEWMGRISAGSGNTKYNEKFKGRVTITADTSTSTAYME |
| | | LSSLRSEDTAVYYCAGSYYSYDVLDYWGQGTTVTVSSGGGG |
| | | SGGGGSGGGGSGGGGSDIQMTQSPSFLSASVGDRVTITCKAS |
| | | QNVEDRVAWYQQKPGKAPKALIYSSSHRYKGVPSRFSGSGS |
| | | GTEFTLTISSLQPEDFATYFCQQFKSYPLTFGQGTKLEIK |
| SEQ ID NO: | VL | DIQMTQSPSFLSASVGDRVTITCKASQNVEDRVAWYQQKPG |
| 172 | | KAPKALIYSSSHRYKGVPSRFSGSGSGTEFTLTISSLQPEDFAT |
| | | YFCQQFKSYPLTFGQGTKLEIK |
| SEQ ID NO: | VH | QVQLVQSGAEVKKPGSSVKVSCKASGTDFKLTYIHWVRQAP |
| 173 | | GQGLEWMGRISAGSGNTKYNEKFKGRVTITADTSTSTAYME |
| | | LSSLRSEDTAVYYCAGSYYSYDVLDYWGQGTTVTVSS |

A-H.34

| | | |
|---|---|---|
| SEQ ID NO: | VH + VL | QVQLVQSGAEVKKPGSSVKVSCKASGTDFRLTYIHWVRQAP |
| 174 | | GQGLEWMGRISPGSGNTKYNEKFKGRVTITADTSTSTAYMEL |
| | | SSLRSEDTAVYYCAGSYYSYDVLDYWGQGTTVTVSSGGGGS |
| | | GGGGSGGGGSGGGGSDIQMTQSPSFLSASVGDRVTITCKASQ |
| | | NVGNRVAWYQQKPGKAPKALIYSSSHRYKGVPSRFSGSGSG |
| | | TEFTLTISSLQPEDFATYFCQQFKSYPLTFGQGTKLEIK |
| SEQ ID NO: | VL | DIQMTQSPSFLSASVGDRVTITCKASQNVGNRVAWYQQKPG |
| 175 | | KAPKALIYSSSHRYKGVPSRFSGSGSGTEFTLTISSLQPEDFAT |
| | | YFCQQFKSYPLTFGQGTKLEIK |
| SEQ ID NO: | VH | QVQLVQSGAEVKKPGSSVKVSCKASGTDFRLTYIHWVRQAP |
| 176 | | GQGLEWMGRISPGSGNTKYNEKFKGRVTITADTSTSTAYMEL |
| | | SSLRSEDTAVYYCAGSYYSYDVLDYWGQGTTVTVSS |

A-H.35

| | | |
|---|---|---|
| SEQ ID NO: | VH + VL | QVQLVQSGAEVKKPGSSVKVSCKASGHDFDKTYIHWVRQAP |
| 177 | | GQGLEWMGRVSAGSGNVKYNEKFKGRVTITADTSTSTAYME |
| | | LSSLRSEDTAVYYCAGSYYSYDVLDYWGQGTTVTVSSGGGG |
| | | SGGGGSGGGGSGGGGSDIQMTQSPSFLSASVGDRVTITCKAS |
| | | QNVEDRVAWYQQKPGKAPKALIYSSSHRYKGVPSRFSGSGS |
| | | GTEFTLTISSLQPEDFATYFCQQFKSYPLTFGQGTKLEIK |
| SEQ ID NO: | VL | DIQMTQSPSFLSASVGDRVTITCKASQNVEDRVAWYQQKPG |
| 178 | | KAPKALIYSSSHRYKGVPSRFSGSGSGTEFTLTISSLQPEDFAT |
| | | YFCQQFKSYPLTFGQGTKLEIK |
| SEQ ID NO: | VH | QVQLVQSGAEVKKPGSSVKVSCKASGHDFDKTYIHWVRQAP |
| 179 | | GQGLEWMGRVSAGSGNVKYNEKFKGRVTITADTSTSTAYME |
| | | LSSLRSEDTAVYYCAGSYYSYDVLDYWGQGTTVTVSS |

A-H.36

| | | |
|---|---|---|
| SEQ ID NO: | VH + VL | QVQLVQSGAEVKKPGSSVKVSCKASGHDFKLTYIHWVRQAP |
| 180 | | GQGLEWMGRVSPGSGNTKYNEKFKGRVTITADTSTSTAYME |
| | | LSSLRSEDTAVYYCAGSYYSYDVLDYWGQGTTVTVSSGGGG |
| | | SGGGGSGGGGSGGGGSDIQMTQSPSFLSASVGDRVTITCKAS |
| | | QNVEDRVAWHQQKPGKAPKALIYSSSHRYKGVPSRFSGSGS |
| | | GTEFTLTISSLQPEDFATYFCQQFKSYPLTFGQGTKLEIK |
| SEQ ID NO: | VL | DIQMTQSPSFLSASVGDRVTITCKASQNVEDRVAWHQQKPG |
| 181 | | KAPKALIYSSSHRYKGVPSRFSGSGSGTEFTLTISSLQPEDFAT |
| | | YFCQQFKSYPLTFGQGTKLEIK |
| SEQ ID NO: | VH | QVQLVQSGAEVKKPGSSVKVSCKASGHDFKLTYIHWVRQAP |
| 182 | | GQGLEWMGRVSPGSGNTKYNEKFKGRVTITADTSTSTAYME |
| | | LSSLRSEDTAVYYCAGSYYSYDVLDYWGQGTTVTVSS |

A-H.37

| | | |
|---|---|---|
| SEQ ID NO: | VH + VL | QVQLVQSGAEVKKPGSSVKVSCKASGHDFDKTYIHWVRQAP |
| 183 | | GQGLEWMGRIYPGSGNVKYNEKFKGRVTITADTSTSTAYME |
| | | LSSLRSEDTAVYYCAGSYYSYDVLDYWGQGTTVTVSSGGGG |
| | | SGGGGSGGGGSGGGGSDIQMTQSPSFLSASVGDRVTITCKAS |
| | | QNVADRVAWYQQKPGKAPKALIYSSSHRYKGVPSRFSGSGS |
| | | GTEFTLTISSLQPEDFATYFCQQFKSYPLTFGQGTKLEIK |
| SEQ ID NO: | VL | DIQMTQSPSFLSASVGDRVTITCKASQNVADRVAWYQQKPG |
| 184 | | KAPKALIYSSSHRYKGVPSRFSGSGSGTEFTLTISSLQPEDFAT |
| | | YFCQQFKSYPLTFGQGTKLEIK |
| SEQ ID NO: | VH | QVQLVQSGAEVKKPGSSVKVSCKASGHDFDKTYIHWVRQAP |
| 185 | | GQGLEWMGRIYPGSGNVKYNEKFKGRVTITADTSTSTAYME |
| | | LSSLRSEDTAVYYCAGSYYSYDVLDYWGQGTTVTVSS |

A-H.38

| | | |
|---|---|---|
| SEQ ID NO: | VH + VL | QVQLVQSGAEVKKPGSSVKVSCKASGTDFDKTYIHWVRQAP |
| 186 | | GQGLEWMGRISAGSGNVKYNEKFKGRVTITADTSTSTAYME |
| | | LSSLRSEDTAVYYCAGSYYSYDVLDYWGQGTTVTVSSGGGG |
| | | SGGGGSGGGGSGGGGSDIQMTQSPSFLSASVGDRVTITCKAS |
| | | QNVDDRVAWYQQKPGKAPKALIYSSSHRYKGVPSRFSGSGS |
| | | GTEFTLTISSLQPEDFATYFCQQFKSYPLTFGQGTKLEIK |
| SEQ ID NO: | VL | DIQMTQSPSFLSASVGDRVTITCKASQNVDDRVAWYQQKPG |
| 187 | | KAPKALIYSSSHRYKGVPSRFSGSGSGTEFTLTISSLQPEDFAT |
| | | YFCQQFKSYPLTFGQGTKLEIK |
| SEQ ID NO: | VH | QVQLVQSGAEVKKPGSSVKVSCKASGTDFDKTYIHWVRQAP |
| 188 | | GQGLEWMGRISAGSGNVKYNEKFKGRVTITADTSTSTAYME |
| | | LSSLRSEDTAVYYCAGSYYSYDVLDYWGQGTTVTVSS |

A-H.39

| | | |
|---|---|---|
| SEQ ID NO: | VH + VL | QVQLVQSGAEVKKPGSSVKVSCKASGTDFDKIYIHWVRQAP |
| 189 | | GQGLEWMGRISAGSGNIKYNEKFKGRVTITADTSTSTAYMEL |
| | | SSLRSEDTAVYYCAGSYYSYDVLDYWGQGTTVTVSSGGGGS |
| | | GGGGSGGGGSGGGGSDIQMTQSPSFLSASVGDRVTITCKASQ |
| | | NVDDRVAWYQQKPGKAPKALIYSSSHRYKGVPSRFSGSGSG |
| | | TEFTLTISSLQPEDFATYFCQQFKSYPLTFGQGTKLEIK |
| SEQ ID NO: | VL | DIQMTQSPSFLSASVGDRVTITCKASQNVDDRVAWYQQKPG |
| 190 | | KAPKALIYSSSHRYKGVPSRFSGSGSGTEFTLTISSLQPEDFAT |
| | | YFCQQFKSYPLTFGQGTKLEIK |
| SEQ ID NO: | VH | QVQLVQSGAEVKKPGSSVKVSCKASGTDFDKIYIHWVRQAP |
| 191 | | GQGLEWMGRISAGSGNIKYNEKFKGRVTITADTSTSTAYMEL |
| | | SSLRSEDTAVYYCAGSYYSYDVLDYWGQGTTVTVSS |

A-H.40

| | | |
|---|---|---|
| SEQ ID NO: | VH + VL | QVQLVQSGAEVKKPGSSVKVSCKASGTDFDKIYIHWVRQAP |
| 192 | | GQGLEWMGRISAGSGNVKYNEKFKGRVTITADTSTSTAYME |
| | | LSSLRSEDTAVYYCAGSYYSYDVLDYWGQGTTVTVSSGGGG |
| | | SGGGGSGGGGSGGGGSDIQMTQSPSFLSASVGDRVTITCKAS |
| | | QNVGDRVAWYQQKPGKAPKALIYSSSHRYKGVPSRFSGSGS |
| | | GTEFTLTISSLQPEDFATYFCQQFKSYPLTFGQGTKLEIK |
| SEQ ID NO: | VL | DIQMTQSPSFLSASVGDRVTITCKASQNVGDRVAWYQQKPG |
| 193 | | KAPKALIYSSSHRYKGVPSRFSGSGSGTEFTLTISSLQPEDFAT |
| | | YFCQQFKSYPLTFGQGTKLEIK |
| SEQ ID NO: | VH | QVQLVQSGAEVKKPGSSVKVSCKASGTDFDKIYIHWVRQAP |
| 194 | | GQGLEWMGRISAGSGNVKYNEKFKGRVTITADTSTSTAYME |
| | | LSSLRSEDTAVYYCAGSYYSYDVLDYWGQGTTVTVSS |

A-H.41

| | | |
|---|---|---|
| SEQ ID NO: | VH + VL | QVQLVQSGAEVKKPGSSVKVSCKASGGTFKLTYIHWVRQAP |
| 195 | | GQGLEWMGRVSAGSGNVKYNEKFKGRVTITADTSTSTAYME |
| | | LSSLRSEDTAVYYCAGSYYSYDVLDYWGQGTTVTVSSGGGG |
| | | SGGGGSGGGGSGGGGSDIQMTQSPSFLSASVGDRVTITCKAS |
| | | QNVDDRVAWYQQKPGKAPKALIYSSSHRYKGVPSRFSGSGS |
| | | GTEFTLTISSLQPEDFATYFCQQFKSYPLTFGQGTKLEIK |
| SEQ ID NO: | VL | DIQMTQSPSFLSASVGDRVTITCKASQNVDDRVAWYQQKPG |
| 196 | | KAPKALIYSSSHRYKGVPSRFSGSGSGTEFTLTISSLQPEDFAT |
| | | YFCQQFKSYPLTFGQGTKLEIK |
| SEQ ID NO: | VH | QVQLVQSGAEVKKPGSSVKVSCKASGGTFKLTYIHWVRQAP |
| 197 | | GQGLEWMGRVSAGSGNVKYNEKFKGRVTITADTSTSTAYME |
| | | LSSLRSEDTAVYYCAGSYYSYDVLDYWGQGTTVTVSS |

A-H.42

| | | |
|---|---|---|
| SEQ ID NO: | VH + VL | QVQLVQSGAEVKKPGSSVKVSCKASGTDFKLTYIHWVRQAP |
| 198 | | GQGLEWMGRISPGSGNVKYNEKFKGRVTITADTSTSTAYME |
| | | LSSLRSEDTAVYYCAGSYYSYDVLDYWGQGTTVTVSSGGGG |
| | | SGGGGSGGGGSGGGGSDIQMTQSPSFLSASVGDRVTITCKAS |
| | | QNVDNRVAWHQQKPGKAPKALIYSSSHRYKGVPSRFSGSGS |
| | | GTEFTLTISSLQPEDFATYFCQQFKSYPLTFGQGTKLEIK |
| SEQ ID NO: | VL | DIQMTQSPSFLSASVGDRVTITCKASQNVDNRVAWHQQKPG |
| 199 | | KAPKALIYSSSHRYKGVPSRFSGSGSGTEFTLTISSLQPEDFAT |
| | | YFCQQFKSYPLTFGQGTKLEIK |
| SEQ ID NO: | VH | QVQLVQSGAEVKKPGSSVKVSCKASGTDFKLTYIHWVRQAP |
| 200 | | GQGLEWMGRISPGSGNVKYNEKFKGRVTITADTSTSTAYME |
| | | LSSLRSEDTAVYYCAGSYYSYDVLDYWGQGTTVTVSS |

A-H.43

| | | |
|---|---|---|
| SEQ ID NO: | VH + VL | QVQLVQSGAEVKKPGSSVKVSCKASGHDFDKFYIHWVRQAP |
| 201 | | GQGLEWMGRVSAGSGNTKYNEKFKGRVTITADTSTSTAYME |
| | | LSSLRSEDTAVYYCAGSYYSYDVLDYWGQGTTVTVSSGGGG |
| | | SGGGGSGGGGSGGGGSDIQMTQSPSFLSASVGDRVTITCKAS |
| | | QNVDNRVAWYQQKPGKAPKALIYSSSHRYKGVPSRFSGSGS |
| | | GTEFTLTISSLQPEDFATYFCQQFKSYPLTFGQGTKLEIK |
| SEQ ID NO: | VL | DIQMTQSPSFLSASVGDRVTITCKASQNVDNRVAWYQQKPG |
| 202 | | KAPKALIYSSSHRYKGVPSRFSGSGSGTEFTLTISSLQPEDFAT |
| | | YFCQQFKSYPLTFGQGTKLEIK |
| SEQ ID NO: | VH | QVQLVQSGAEVKKPGSSVKVSCKASGHDFDKFYIHWVRQAP |
| 203 | | GQGLEWMGRVSAGSGNTKYNEKFKGRVTITADTSTSTAYME |
| | | LSSLRSEDTAVYYCAGSYYSYDVLDYWGQGTTVTVSS |

A-H.44

| | | |
|---|---|---|
| SEQ ID NO: | VH + VL | QVQLVQSGAEVKKPGSSVKVSCKASGTDFDKFYIHWVRQAP |
| 204 | | GQGLEWMGRVSAGSGNVKYNEKFKGRVTITADTSTSTAYME |
| | | LSSLRSEDTAVYYCAGSYYSYDVLDYWGQGTTVTVSSGGGG |
| | | SGGGGSGGGGSGGGGSDIQMTQSPSFLSASVGDRVTITCKAS |
| | | QNVGDRVVWYQQKPGKAPKALIYSSSHRYKGVPSRFSGSGS |
| | | GTEFTLTISSLQPEDFATYFCQQFKSYPLTFGQGTKLEIK |
| SEQ ID NO: | VH | QVQLVQSGAEVKKPGSSVKVSCKASGTDFDKFYIHWVRQAP |
| 205 | | GQGLEWMGRVSAGSGNVKYNEKFKGRVTITADTSTSTAYME |
| | | LSSLRSEDTAVYYCAGSYYSYDVLDYWGQGTTVTVSS |

A-H.45

| | | |
|---|---|---|
| SEQ ID NO: | VH + VL | QVQLVQSGAEVKKPGSSVKVSCKASGYSFTTYYIHWVRQAP |
| 206 | | GQGLEWMGWFSAGSGNTKYNEKFKGRVTITADTSTSTAYME |
| | | LSSLRSEDTAVYYCAVSYYSYDVLDYWGQGTTVTVSSGGGG |
| | | SGGGGSGGGGSGGGGSDIQMTQSPSFLSASVGDRVTITCKAS |
| | | QNVGINVVWHQQKPGKAPKALIYSSSHRYSGVPSRFSGSGSG |
| | | TEFTLTISSLQPEDFATYFCQQFKSYPLTFGQGTKLEIK |
| SEQ ID NO: | VH | QVQLVQSGAEVKKPGSSVKVSCKASGYSFTTYYIHWVRQAP |
| 207 | | GQGLEWMGWFSAGSGNTKYNEKFKGRVTITADTSTSTAYME |
| | | LSSLRSEDTAVYYCAVSYYSYDVLDYWGQGTTVTVSS |

A-H.46

| | | |
|---|---|---|
| SEQ ID NO: | VH + VL | QVQLVQSGAEVKKPGSSVKVSCKASGYSFTTYYIHWVRQAP |
| 208 | | GQGLEWMGWFSAGSGNTKYNEKFKGRVTITADTSTSTAYME |
| | | LSSLRSEDTAVYYCAGSYYSYDVLDYWGQGTTVTVSSGGGG |
| | | SGGGGSGGGGSGGGGSDIQMTQSPSFLSASVGDRVTITCKAS |
| | | QNVGINVVWHQQKPGKAPKALIYSSSHRYSGVPSRFSGSGSG |
| | | TEFTLTISSLQPEDFATYFCQQFKSYPLTFGQGTKLEIK |
| SEQ ID NO: | VH | QVQLVQSGAEVKKPGSSVKVSCKASGYSFTTYYIHWVRQAP |
| 209 | | GQGLEWMGWFSAGSGNTKYNEKFKGRVTITADTSTSTAYME |
| | | LSSLRSEDTAVYYCAGSYYSYDVLDYWGQGTTVTVSS |

A-H.47

| | | |
|---|---|---|
| SEQ ID NO: | VH + VL | QVQLVQSGAEVKKPGSSVKVSCKASGYSFTTYYIHWVRQAP |
| 210 | | GQGLEWMGWFFPGSGNTKYNEKFKGRVTITADTSTSTAYME |
| | | LSSLRSEDTAVYYCAGSYYSYDVLDYWGQGTTVTVSSGGGG |
| | | SGGGGSGGGGSGGGGSDIQMTQSPSFLSASVGDRVTITCKAS |
| | | QNVGINVVWHQQKPGKAPKALIYSSSHRYSGVPSRFSGSGSG |
| | | TEFTLTISSLQPEDFATYFCQQFKSYPLTFGQGTKLEIK |
| SEQ ID NO: | VH | QVQLVQSGAEVKKPGSSVKVSCKASGYSFTTYYIHWVRQAP |
| 211 | | GQGLEWMGWFFPGSGNTKYNEKFKGRVTITADTSTSTAYME |
| | | LSSLRSEDTAVYYCAGSYYSYDVLDYWGQGTTVTVSS |

A-H.48

| | | |
|---|---|---|
| SEQ ID NO: | VH + VL | QVQLVQSGAEVKKPGSSVKVSCKASGYSFTTYYIHWVRQAP |
| 212 | | GQGLEWMGWFSPGSGNTKYNEKFKGRVTITADTSTSTAYME |
| | | LSSLRSEDTAVYYCAVSYYSYDVLDYWGQGTTVTVSSGGGG |
| | | SGGGGSGGGGSGGGGSDIQMTQSPSFLSASVGDRVTITCKAS |
| | | QNVGINVVWHQQKPGKAPKALIYSSSHRYSGVPSRFSGSGSG |
| | | TEFTLTISSLQPEDFATYFCQQFKSYPLTFGQGTKLEIK |
| SEQ ID NO: | VH | QVQLVQSGAEVKKPGSSVKVSCKASGYSFTTYYIHWVRQAP |
| 213 | | GQGLEWMGWFSPGSGNTKYNEKFKGRVTITADTSTSTAYME |
| | | LSSLRSEDTAVYYCAVSYYSYDVLDYWGQGTTVTVSS |

A-H.49

| | | |
|---|---|---|
| SEQ ID NO: | VH + VL | QVQLVQSGAEVKKPGSSVKVSCKASGYSFTTYYIHWVRQAP |
| 214 | | GQGLEWMGWFSPGSGNTKYNEKFKGRVTITADTSTSTAYME |
| | | LSSLRSEDTAVYYCAGSYYSYDVLDYWGQGTTVTVSSGGGG |
| | | SGGGGSGGGGSGGGGSDIQMTQSPSFLSASVGDRVTITCKAS |
| | | QNVGINVVWHQQKPGKAPKALIYSSSHRYSGVPSRFSGSGSG |
| | | TEFTLTISSLQPEDFATYFCQQFKSYPLTFGQGTKLEIK |
| SEQ ID NO: | VH | QVQLVQSGAEVKKPGSSVKVSCKASGYSFTTYYIHWVRQAP |
| 215 | | GQGLEWMGWFSPGSGNTKYNEKFKGRVTITADTSTSTAYME |
| | | LSSLRSEDTAVYYCAGSYYSYDVLDYWGQGTTVTVSS |

A-H.50

| | | |
|---|---|---|
| SEQ ID NO: | VH + VL | QVQLVQSGAEVKKPGSSVKVSCKASGYSFTTYYIHWVRQAP |
| 216 | | GQGLEWMGRIFPGSGNIKYNEKFKGRVTITADTSTSTAYMEL |
| | | SSLRSEDTAVYYCAGSYYSYDVLDYWGQGTTVTVSSGGGGS |
| | | GGGGSGGGGSGGGGSDIQMTQSPSFLSASVGDRVTITCKASQ |
| | | NVGINVVWHQQKPGKAPKALIYSSSHRYSGVPSRFSGSGSGT |
| | | EFTLTISSLQPEDFATYFCQQFKSYPLTFGQGTKLEIK |
| SEQ ID NO: | VH | QVQLVQSGAEVKKPGSSVKVSCKASGYSFTTYYIHWVRQAP |
| 217 | | GQGLEWMGRIFPGSGNIKYNEKFKGRVTITADTSTSTAYMEL |
| | | SSLRSEDTAVYYCAGSYYSYDVLDYWGQGTTVTVSS |

A-H.51

| | | |
|---|---|---|
| SEQ ID NO: | VH + VL | QVQLVQSGAEVKKPGSSVKVSCKASGYSFTTYYIHWVRQAP |
| 218 | | GQGLEWMGWFFPGSGNIKYNEKFKGRVTITADTSTSTAYME |
| | | LSSLRSEDTAVYYCAGSIYSAGVLDYWGQGTTVTVSSGGGGS |
| | | GGGGSGGGGSGGGGSDIQMTQSPSFLSASVGDRVTITCKASQ |
| | | NVGINVVWHQQKPGKAPKALIYSSSHRYSGVPSRFSGSGSGT |
| | | EFTLTISSLQPEDFATYFCQQFKSYPLTFGQGTKLEIK |
| SEQ ID NO: | VH | QVQLVQSGAEVKKPGSSVKVSCKASGYSFTTYYIHWVRQAP |
| 219 | | GQGLEWMGWFFPGSGNIKYNEKFKGRVTITADTSTSTAYME |
| | | LSSLRSEDTAVYYCAGSIYSAGVLDYWGQGTTVTVSS |

A-H.52

| | | |
|---|---|---|
| SEQ ID NO: | VH + VL | QVQLVQSGAEVKKPGSSVKVSCKASGYSFTLGYIHWVRQAP |
| 220 | | GQGLEWMGWFFPGSGNIKYNEKFKGRVTITADTSTSTAYME |
| | | LSSLRSEDTAVYYCAGSYYSYDVLDYWGQGTTVTVSSGGGG |
| | | SGGGGSGGGGSGGGGSDIQMTQSPSFLSASVGDRVTITCKAS |
| | | QNVGINVVWHQQKPGKAPKALIYSSSHRYSGVPSRFSGSGSG |
| | | TEFTLTISSLQPEDFATYFCQQFKSYPLTFGQGTKLEIK |
| SEQ ID NO: | VH | QVQLVQSGAEVKKPGSSVKVSCKASGYSFTLGYIHWVRQAP |
| 221 | | GQGLEWMGWFFPGSGNIKYNEKFKGRVTITADTSTSTAYME |
| | | LSSLRSEDTAVYYCAGSYYSYDVLDYWGQGTTVTVSS |

A-H.53

| | | |
|---|---|---|
| SEQ ID NO: | VH + VL | QVQLVQSGAEVKKPGSSVKVSCKASGYSFRLTYIHWVRQAP |
| 222 | | GQGLEWMGWFFPGSGNIKYNEKFKGRVTITADTSTSTAYME |
| | | LSSLRSEDTAVYYCAGSYYSYDVLDYWGQGTTVTVSSGGGG |
| | | SGGGGSGGGGSGGGGSDIQMTQSPSFLSASVGDRVTITCKAS |
| | | QNVGINVVWHQQKPGKAPKALIYSSSHRYSGVPSRFSGSGSG |
| | | TEFTLTISSLQPEDFATYFCQQFKSYPLTFGQGTKLEIK |
| SEQ ID NO: | VH | QVQLVQSGAEVKKPGSSVKVSCKASGYSFRLTYIHWVRQAP |
| 223 | | GQGLEWMGWFFPGSGNIKYNEKFKGRVTITADTSTSTAYME |
| | | LSSLRSEDTAVYYCAGSYYSYDVLDYWGQGTTVTVSS |

A-H.54

| | | |
|---|---|---|
| SEQ ID NO: | VH + VL | QVQLVQSGAEVKKPGSSVKVSCKASGYSFHNWYIHWVRQA |
| 224 | | PGQGLEWMGWFFPGSGNIKYNEKFKGRVTITADTSTSTAYM |
| | | ELSSLRSEDTAVYYCAGSYYSYDVLDYWGQGTTVTVSSGGG |
| | | GSGGGGSGGGGSGGGGSDIQMTQSPSFLSASVGDRVTITCKA |
| | | SQNVGINVVWHQQKPGKAPKALIYSSSHRYSGVPSRFSGSGS |
| | | GTEFTLTISSLQPEDFATYFCQQFKSYPLTFGQGTKLEIK |
| SEQ ID NO: | VH | QVQLVQSGAEVKKPGSSVKVSCKASGYSFHNWYIHWVRQA |
| 225 | | PGQGLEWMGWFFPGSGNIKYNEKFKGRVTITADTSTSTAYM |
| | | ELSSLRSEDTAVYYCAGSYYSYDVLDYWGQGTTVTVSS |

A-H.55 antibody

| | | |
|---|---|---|
| SEQ ID NO: 3 | HC CDR1 (Combined) | GYSFTTYYIH |
| SEQ ID NO: 4 | HC CDR2 (Combined) | WFFPGSGNIKYNEKFKG |
| SEQ ID NO: 5 | HC CDR3 (Combined) | SYYSYDVLDY |
| SEQ ID NO: 45 | HC CDR1 (Kabat) | TYYIH |
| SEQ ID NO: 46 | HC CDR2 (Kabat) | WFFPGSGNIKYNEKFKG |
| SEQ ID NO: 47 | HC CDR3 (Kabat) | SYYSYDVLDY |
| SEQ ID NO: 48 | HC CDR1 (Chothia) | GYSFTTY |
| SEQ ID NO: 49 | HC CDR2 (Chothia) | FPGSGN |
| SEQ ID NO: 50 | HC CDR3 (Chothia) | SYYSYDVLDY |
| SEQ ID NO: | VH | QVQLVQSGAEVKKPGSSVKVSCKASGYSFTTYYIHWVRQAP |
| 1100 | | GQGLEWMGWFFPGSGNIKYNEKFKGRVTITADTSTSTAYME |
| | | LSSLRSEDTAVYYCAGSYYSYDVLDYWGQGTTVTVSS |
| SEQ ID NO: 6 | LC CDR1 (Combined) | KASQNVGINVV |
| SEQ ID NO: 7 | LC CDR2 (Combined) | SSSHRYS |
| SEQ ID NO: 8 | LC CDR3 (Combined) | QQFKSYPLT |
| SEQ ID NO: 51 | LC CDR1 (Kabat) | KASQNVGINVV |
| SEQ ID NO: 52 | LC CDR2 (Kabat) | SSSHRYS |
| SEQ ID NO: 53 | LC CDR3 (Kabat) | QQFKSYPLT |
| SEQ ID NO: 54 | LC CDR1 (Chothia) | KASQNVGINVV |
| SEQ ID NO: 55 | LC CDR2 (chothia) | SSSHRYS |
| SEQ ID NO: 56 | LC CDR3 (chothia) | QQFKSYPLT |
| SEQ ID NO: | VL | QSVLTQPPSVSEAPRQRVTISCKASQNVGINVVWHQQLPGKA |
| 1101 | | PKALIYSSSHRYSGVSDRFSGSGSGTSFSLAISGLQSEDEADYF |
| | | CQQFKSYPLTFGTGTKVTVL |

A-H.56

| | | |
|---|---|---|
| SEQ ID NO: | VH + VL (ScFv) | QVQLVQSGAEVKKPGSSVKVSCKASGHDFDKFYIHWVRQAP |
| 1309 | | GQGLEWMGRVSAGSGNVKYNEKFKGRVTITADTSTSTAYME |
| | | LSSLRSEDTAVYYCAGSYYSYDVLDYWGQGTTVTVSSGGGG |
| | | SGGGGSGGGGSGGGGSDIQMTQSPSFLSASVGDRVTITCKAS |
| | | QNVGNRVAWYQQKPGKAPKALIYSSSHRYKGVPSRFSGSGS |
| | | GTEFTLTISSLQPEDFATYFCQQFKSYPLTFGQGTKLEIK |

A-H.57

| | | |
|---|---|---|
| SEQ ID NO: | VH + VL (ScFv) | QVQLVQSGAEVKKPGSSVKVSCKASGHDFRLTYIHWVRQAP |
| 1326 | | GQGLEWMGRVSAGSGNTKYNEKFKGRVTITADTSTSTAYME |
| | | LSSLRSEDTAVYYCAVSYYSYDVLDYWGQGTTVTVSSGGGG |
| | | SGGGGSGGGGSGGGGSDIQMTQSPSFLSASVGDRVTITCKAS |
| | | QNVGDRVVWHQQKPGKAPKALIYSSSHRYKGVPSRFSGSGS |
| | | GTEFTLTISSLQPEDFATYFCQQFKSYPLTFGQGTKLEIK |

A-H.58

| | | |
|---|---|---|
| SEQ ID NO: | VH + VL (ScFv) | QVQLVQSGAEVKKPGSSVKVSCKASGHDFRLTYIHWVRQAP |
| 1327 | | GQGLEWMGRVSAGSGNVKYNEKFKGRVTITADTSTSTAYME |
| | | LSSLRSEDTAVYYCAVSYYSYDVLDYWGQGTTVTVSSGGGG |
| | | SGGGGSGGGGSGGGGSDIQMTQSPSFLSASVGDRVTITCKAS |
| | | QNVGNRVVWHQQKPGKAPKALIYSSSHRYKGVPSRFSGSGS |
| | | GTEFTLTISSLQPEDFATYFCQQFKSYPLTFGQGTKLEIK |

A-H.59

| | | |
|---|---|---|
| SEQ ID NO: | VH + VL (ScFv) | QVQLVQSGAEVKKPGSSVKVSCKASGHDFRLTYIHWVRQAP |
| 1328 | | GQGLEWMGRIYAGSGNVKYNEKFKGRVTITADTSTSTAYME |
| | | LSSLRSEDTAVYYCAVSYYSYDVLDYWGQGTTVTVSSGGGG |
| | | SGGGGSGGGGSGGGGSDIQMTQSPSFLSASVGDRVTITCKAS |
| | | QNVADRVVWHQQKPGKAPKALIYSSSHRYKGVPSRFSGSGS |
| | | GTEFTLTISSLQPEDFATYFCQQFKSYPLTFGQGTKLEIK |

A-H.60

| | | |
|---|---|---|
| SEQ ID NO: | VH + VL (ScFv) | QVQLVQSGAEVKKPGSSVKVSCKASGHDFKLTYIHWVRQAP |
| 1329 | | GQGLEWMGRVSAGSGNTKYNEKFKGRVTITADTSTSTAYME |
| | | LSSLRSEDTAVYYCAVSYYSYDVLDYWGQGTTVTVSSGGGG |
| | | SGGGGSGGGGSGGGGSDIQMTQSPSFLSASVGDRVTITCKAS |
| | | QNVGDRVAWHQQKPGKAPKALIYSSSHRYKGVPSRFSGSGS |
| | | GTEFTLTISSLQPEDFATYFCQQFKSYPLTFGQGTKLEIK |

A-H.61

| | | |
|---|---|---|
| SEQ ID NO: | VH + VL (ScFv) | QVQLVQSGAEVKKPGSSVKVSCKASGHDFKLTYIHWVRQAP |
| 1330 | | GQGLEWMGRVSAGSGNTKYNEKFKGRVTITADTSTSTAYME |
| | | LSSLRSEDTAVYYCAVSYYSYDVLDYWGQGTTVTVSSGGGG |
| | | SGGGGSGGGGSGGGGSDIQMTQSPSFLSASVGDRVTITCKAS |
| | | QNVDNRVAWHQQKPGKAPKALIYSSSHRYKGVPSRFSGSGS |
| | | GTEFTLTISSLQPEDFATYFCQQFKSYPLTFGQGTKLEIK |

A-H.62

| | | |
|---|---|---|
| SEQ ID NO: | VH + VL (ScFv) | QVQLVQSGAEVKKPGSSVKVSCKASGHDFRLTYIHWVRQAP |
| 1331 | | GQGLEWMGRVSAGSGNVKYNEKFKGRVTITADTSTSTAYME |
| | | LSSLRSEDTAVYYCAVSYYSYDVLDYWGQGTTVTVSSGGGG |
| | | SGGGGSGGGGSGGGGSDIQMTQSPSFLSASVGDRVTITCKAS |
| | | QNVADRVVWHQQKPGKAPKALIYSSSHRYKGVPSRFSGSGS |
| | | GTEFTLTISSLQPEDFATYFCQQFKSYPLTFGQGTKLEIK |

A-H.63

| | | |
|---|---|---|
| SEQ ID NO: | VH + VL (ScFv) | QVQLVQSGAEVKKPGSSVKVSCKASGHDFRLTYIHWVRQAP |
| 1332 | | GQGLEWMGRVYAGSGNTKYNEKFKGRVTITADTSTSTAYM |
| | | ELSSLRSEDTAVYYCAVSYYSYDVLDYWGQGTTVTVSSGGG |
| | | GSGGGGSGGGGSGGGGSDIQMTQSPSFLSASVGDRVTITCKA |
| | | SQNVEDRVVWHQQKPGKAPKALIYSSSHRYKGVPSRFSGSGS |
| | | GTEFTLTISSLQPEDFATYFCQQFKSYPLTFGQGTKLEIK |

A-H.64

| | | |
|---|---|---|
| SEQ ID NO: | VH + VL (ScFv) | QVQLVQSGAEVKKPGSSVKVSCKASGHDFKLTYIHWVRQAP |
| 1333 | | GQGLEWMGRVSAGSGNTKYNEKFKGRVTITADTSTSTAYME |
| | | LSSLRSEDTAVYYCAVSYYSYDVLDYWGQGTTVTVSSGGGG |
| | | SGGGGSGGGGSGGGGSDIQMTQSPSFLSASVGDRVTITCKAS |
| | | QNVADRVVWHQQKPGKAPKALIYSSSHRYKGVPSRFSGSGS |
| | | GTEFTLTISSLQPEDFATYFCQQFKSYPLTFGQGTKLEIK |

A-H.65

| | | |
|---|---|---|
| SEQ ID NO: | VH + VL (ScFv) | QVQLVQSGAEVKKPGSSVKVSCKASGHDFKLTYIHWVRQAP |
| 1334 | | GQGLEWMGRISAGSGNTKYNEKFKGRVTITADTSTSTAYME |
| | | LSSLRSEDTAVYYCAVSYYSYDVLDYWGQGTTVTVSSGGGG |
| | | SGGGGSGGGGSGGGGSDIQMTQSPSFLSASVGDRVTITCKAS |
| | | QNVGDRVVWHQQKPGKAPKALIYSSSHRYKGVPSRFSGSGS |
| | | GTEFTLTISSLQPEDFATYFCQQFKSYPLTFGQGTKLEIK |

A-H.66

| | | |
|---|---|---|
| SEQ ID NO: | VH + VL (ScFv) | QVQLVQSGAEVKKPGSSVKVSCKASGHDFKLTYIHWVRQAP |
| 1335 | | GQGLEWMGRIYAGSGNTKYNEKFKGRVTITADTSTSTAYME |
| | | LSSLRSEDTAVYYCAVSYYSYDVLDYWGQGTTVTVSSGGGG |
| | | SGGGGSGGGGSGGGGSDIQMTQSPSFLSASVGDRVTITCKAS |
| | | QNVGDRVVWHQQKPGKAPKALIYSSSHRYKGVPSRFSGSGS |
| | | GTEFTLTISSLQPEDFATYFCQQFKSYPLTFGQGTKLEIK |

A-H.67

| | | |
|---|---|---|
| SEQ ID NO: | VH + VL (ScFv) | QVQLVQSGAEVKKPGSSVKVSCKASGTDFKLTYIHWVRQAP |
| 1336 | | GQGLEWMGRIFPGSGNVKYNEKFKGRVTITADTSTSTAYME |
| | | LSSLRSEDTAVYYCAVSYYSYDVLDYWGQGTTVTVSSGGGG |
| | | SGGGGSGGGGSGGGGSDIQMTQSPSFLSASVGDRVTITCKAS |
| | | QNVDNRVAWYQQKPGKAPKALIYSSSHRYKGVPSRFSGSGS |
| | | GTEFTLTISSLQPEDFATYFCQQFKSYPLTFGQGTKLEIK |

A-H.68

| | | |
|---|---|---|
| SEQ ID NO: | VH + VL (ScFv) | QVQLVQSGAEVKKPGSSVKVSCKASGHDFRLTYIHWVRQAP |
| 1337 | | GQGLEWMGRISAGSGNVKYNEKFKGRVTITADTSTSTAYME |
| | | LSSLRSEDTAVYYCAVSYYSYDVLDYWGQGTTVTVSSGGGG |
| | | SGGGGSGGGGSGGGGSDIQMTQSPSFLSASVGDRVTITCKAS |
| | | QNVADRVAWYQQKPGKAPKALIYSSSHRYKGVPSRFSGSGS |
| | | GTEFTLTISSLQPEDFATYFCQQFKSYPLTFGQGTKLEIK |

A-H.69 (also referred to as A-H.13)

| | | |
|---|---|---|
| SEQ ID NO: | VH + VL (ScFv) | QVQLVQSGAEVKKPGSSVKVSCKASGTDFKLTYIHWVRQAP |
| 110 | | GQGLEWMGRIFPGSGNVKYNEKFKGRVTITADTSTSTAYME |
| | | LSSLRSEDTAVYYCAGSYYSYDVLDYWGQGTTVTVSSGGGG |
| | | SGGGGSGGGGSGGGGSDIQMTQSPSFLSASVGDRVTITCKAS |
| | | QNVDNRVAWYQQKPGKAPKALIYSSSHRYKGVPSRFSGSGS |
| | | GTEFTLTISSLQPEDFATYFCQQFKSYPLTFGQGTKLEIK |

A-H humanized-matured VH

| | | |
|---|---|---|
| SEQ ID NO: | VH-humanized matured | QVQLVQSGAEVKKPGSSVKVSCKASGTDFKLTYIHWVRQAP |
| 1310 | 1 | GQGLEWMGRIFPGSGNVKYNEKFKGRVTITADTSTSTAYME |
| | | LSSLRSEDTAVYYCAGSYYSYDVLDYWGQGTTVTVSS |
| SEQ ID NO: | VH-humanized matured | QVQLVQSGAEVKKPGSSVKVSCKASGTDFKLTYIHWVRQAP |
| 1311 | 2 | GQGLEWMGRIFPGSGNVKYNEKFKGRVTITADTSTSTAYME |
| | | LSSLRSEDTAVYYCAVSYYSYDVLDYWGQGTTVTVSS |
| SEQ ID NO: | VH-humanized matured | QVQLVQSGAEVKKPGSSVKVSCKASGHDFRLTYIHWVRQAP |
| 1312 | 3 | GQGLEWMGRISAGSGNVKYNEKFKGRVTITADTSTSTAYME |
| | | LSSLRSEDTAVYYCAVSYYSYDVLDYWGQGTTVTVSS |

A-H humanized-matured VL

| | | |
|---|---|---|
| SEQ ID NO: | VL-humanized matured | DIQMTQSPSFLSASVGDRVTITCKASQNVDNRVAWYQQKPG |
| 1313 | 1 | KAPKALIYSSSHRYKGVPSRFSGSGSGTEFTLTISSLQPEDFAT |
| | | YFCQQFKSYPLTFGQGTKLEIK |
| SEQ ID NO: | VL-humanized matured | DIQMTQSPSFLSASVGDRVTITCKASQNVADRVAWYQQKPG |
| 1314 | 2 | KAPKALIYSSSHRYKGVPSRFSGSGSGTEFTLTISSLQPEDFAT |
| | | YFCQQFKSYPLTFGQGTKLEIK |

A-H.70

| | | |
|---|---|---|
| SEQ ID NO: | HC CDR1 | GHDFRLTYIH |
| 3650 | | |
| SEQ ID NO: | HC CDR2 | RVSAGSGNVKYNEKFKG |
| 3651 | | |
| SEQ ID NO: 5 | HC CDR3 | SYYSYDVLDY |
| SEQ ID NO: | LC CDR1 | KASQNVGNRVV |
| 3652 | | |
| SEQ ID NO: | LC CDR2 | SSSHRYK |
| 3653 | | |
| SEQ ID NO: 8 | LC CDR3 | QQFKSYPLT |
| SEQ ID NO: | VH | QVQLVQSGAEVKKPGSSVKVSCKASGHDFRLTYIHWVRQAP |
| 1346 | (CDRs underlined) | GQGLEWMGRVSAGSGNVKYNEKFKGRVTITADTSTSTAYME |
| | | LSSLRSEDTAVYYCAVSYYSYDVLDYWGQGTTVTVSS |
| SEQ ID NO: | VL | DIQMTQSPSFLSASVGDRVTITCKASQNVGNRVVWHQQKPG |
| 1347 | (CDRs underlined) | KAPKALIYSSSHRYKGVPSRFSGSGSGTEFTLTISSLQPEDFAT |
| | | YFCQQFKSYPLTFGQGTKLEIK |

A-H.71

| | | |
|---|---|---|
| SEQ ID NO: | HC CDR1 | GHDFRLTYIH |
| 3650 | | |
| SEQ ID NO: | HC CDR2 | RIYAGSGNVKYNEKFKG |
| 3654 | | |
| SEQ ID NO: 5 | HC CDR3 | SYYSYDVLDY |
| SEQ ID NO: | LC CDR1 | KASQNVADRVV |
| 3655 | | |
| SEQ ID NO: | LC CDR2 | SSSHRYK |
| 3653 | | |
| SEQ ID NO: 8 | LC CDR3 | QQFKSYPLT |
| SEQ ID NO: | VH | QVQLVQSGAEVKKPGSSVKVSCKASGHDFRLTYIHWVRQAP |
| 1348 | (CDRs underlined) | GQGLEWMGRIYAGSGNVKYNEKFKGRVTITADTSTSTAYME |
| | | LSSLRSEDTAVYYCAVSYYSYDVLDYWGQGTTVTVSS |
| SEQ ID NO: | VL | DIQMTQSPSFLSASVGDRVTITCKASQNVADRVVWHQQKPG |
| 1349 | (CDRs underlined) | KAPKALIYSSSHRYKGVPSRFSGSGSGTEFTLTISSLQPEDFAT |
| | | YFCQQFKSYPLTFGQGTKLEIK |

A-H.72

| | | |
|---|---|---|
| SEQ ID NO: | HC CDR1 | GHDFKLTYIH |
| 3656 | | |
| SEQ ID NO: | HC CDR2 | RVSAGSGNTKYNEKFKG |
| 3657 | | |
| SEQ ID NO: 5 | HC CDR3 | SYYSYDVLDY |
| SEQ ID NO: | LC CDR1 | KASQNVGDRVA |
| 3658 | | |
| SEQ ID NO: | LC CDR2 | SSSHRYK |
| 3653 | | |
| SEQ ID NO: 8 | LC CDR3 | QQFKSYPLT |
| SEQ ID NO: | VH | QVQLVQSGAEVKKPGSSVKVSCKASGHDFKLTYIHWVRQAP |
| 1350 | (CDRs underlined) | GQGLEWMGRVSAGSGNTKYNEKFKGRVTITADTSTSTAYME |
| | | LSSLRSEDTAVYYCAVSYYSYDVLDYWGQGTTVTVSS |
| SEQ ID NO: | VL | DIQMTQSPSFLSASVGDRVTITCKASQNVGDRVAWHQQKPG |
| 1351 | (CDRs underlined) | KAPKALIYSSSHRYKGVPSRFSGSGSGTEFTLTISSLQPEDFAT |
| | | YFCQQFKSYPLTFGQGTKLEIK |

A-H.73

| | | |
|---|---|---|
| SEQ ID NO: | HC CDR1 | GHDFKLTYIH |
| 3656 | | |
| SEQ ID NO: | HC CDR2 | RVSAGSGNTKYNEKFKG |
| 3657 | | |
| SEQ ID NO: 5 | HC CDR3 | SYYSYDVLDY |
| SEQ ID NO: | LC CDR1 | KASQNVDNRVA |
| 3667 | | |
| SEQ ID NO: | LC CDR2 | SSSHRYK |
| 3653 | | |
| SEQ ID NO: 8 | LC CDR3 | QQFKSYPLT |
| SEQ ID NO: | VH | QVQLVQSGAEVKKPGSSVKVSCKASGHDFKLTYIHWVRQAP |
| 1350 | (CDRs underlined) | GQGLEWMGRVSAGSGNTKYNEKFKGRVTITADTSTSTAYME |
| | | LSSLRSEDTAVYYCAVSYYSYDVLDYWGQGTTVTVSS |
| SEQ ID NO: | VL | DIQMTQSPSFLSASVGDRVTITCKASQNVDNRVAWHQQKPG |
| 1353 | (CDRs underlined) | KAPKALIYSSSHRYKGVPSRFSGSGSGTEFTLTISSLQPEDFAT |
| | | YFCQQFKSYPLTFGQGTKLEIK |

A-H.74

| | | |
|---|---|---|
| SEQ ID NO: | HC CDR1 | GHDFRLTYIH |
| 3650 | | |
| SEQ ID NO: | HC CDR2 | RVSAGSGNVKYNEKFKG |
| 3651 | | |
| SEQ ID NO: 5 | HC CDR3 | SYYSYDVLDY |
| SEQ ID NO: | LC CDR1 | KASQNVADRVV |
| 3655 | | |
| SEQ ID NO: | LC CDR2 | SSSHRYK |
| 3653 | | |
| SEQ ID NO: 8 | LC CDR3 | QQFKSYPLT |
| SEQ ID NO: | VH | QVQLVQSGAEVKKPGSSVKVSCKASGHDFRLTYIHWVRQAP |
| 1346 | (CDRs underlined) | GQGLEWMGRVSAGSGNVKYNEKFKGRVTITADTSTSTAYME |
| | | LSSLRSEDTAVYYCAVSYYSYDVLDYWGQGTTVTVSS |
| SEQ ID NO: | VL | DIQMTQSPSFLSASVGDRVTITCKASQNVADRVVWHQQKPG |
| 1349 | (CDRs underlined) | KAPKALIYSSSHRYKGVPSRFSGSGSGTEFTLTISSLQPEDFAT |
| | | YFCQQFKSYPLTFGQGTKLEIK |

A-H.75

| | | |
|---|---|---|
| SEQ ID NO: | HC CDR1 | GHDFRLTYIH |
| 3650 | | |
| SEQ ID NO: | HC CDR2 | RVYAGSGNTKYNEKFKG |
| 3659 | | |
| SEQ ID NO: 5 | HC CDR3 | SYYSYDVLDY |
| SEQ ID NO: | LC CDR1 | KASQNVEDRVV |
| 3660 | | |
| SEQ ID NO: | LC CDR2 | SSSHRYK |
| 3653 | | |
| SEQ ID NO: 8 | LC CDR3 | QQFKSYPLT |
| SEQ ID NO: | VH | QVQLVQSGAEVKKPGSSVKVSCKASGHDFRLTYIHWVRQAP |
| 1356 | (CDRs underlined) | GQGLEWMGRVYAGSGNTKYNEKFKGRVTITADTSTSTAYM |
| | | ELSSLRSEDTAVYYCAVSYYSYDVLDYWGQGTTVTVSS |
| SEQ ID NO: | VL | DIQMTQSPSFLSASVGDRVTITCKASQNVEDRVVWHQQKPG |
| 1357 | (CDRs underlined) | KAPKALIYSSSHRYKGVPSRFSGSGSGTEFTLTISSLQPEDFAT |
| | | YFCQQFKSYPLTFGQGTKLEIK |

A-H.76

| | | |
|---|---|---|
| SEQ ID NO: | HC CDR1 | GHDFKLTYIH |
| 3656 | | |
| SEQ ID NO: | HC CDR2 | RVSAGSGNTKYNEKFKG |
| 3657 | | |
| SEQ ID NO: 5 | HC CDR3 | SYYSYDVLDY |
| SEQ ID NO: | LC CDR1 | KASQNVADRVV |
| 3655 | | |
| SEQ ID NO: | LC CDR2 | SSSHRYK |
| 3653 | | |
| SEQ ID NO: 8 | LC CDR3 | QQFKSYPLT |
| SEQ ID NO: | VH | QVQLVQSGAEVKKPGSSVKVSCKASGHDFKLTYIHWVRQAP |
| 1350 | (CDRs underlined) | GQGLEWMGRVSAGSGNTKYNEKFKGRVTITADTSTSTAYME |
| | | LSSLRSEDTAVYYCAVSYYSYDVLDYWGQGTTVTVSS |
| SEQ ID NO: | VL | DIQMTQSPSFLSASVGDRVTITCKASQNVADRVVWHQQKPG |
| 1349 | (CDRs underlined) | KAPKALIYSSSHRYKGVPSRFSGSGSGTEFTLTISSLQPEDFAT |
| | | YFCQQFKSYPLTFGQGTKLEIK |

A-H.77

| | | |
|---|---|---|
| SEQ ID NO: | HC CDR1 | GHDFKLTYIH |
| 3656 | | |
| SEQ ID NO: | HC CDR2 | RISAGSGNTKYNEKFKG |
| 3661 | | |
| SEQ ID NO: 5 | HC CDR3 | SYYSYDVLDY |
| SEQ ID NO: | LC CDR1 | KASQNVGDRVV |
| 3662 | | |
| SEQ ID NO: | LC CDR2 | SSSHRYK |
| 3653 | | |
| SEQ ID NO: 8 | LC CDR3 | QQFKSYPLT |
| SEQ ID NO: | VH | QVQLVQSGAEVKKPGSSVKVSCKASGHDFKLTYIHWVRQAP |
| 1360 | (CDRs underlined) | GQGLEWMGRISAGSGNTKYNEKFKGRVTITADTSTSTAYME |
| | | LSSLRSEDTAVYYCAVSYYSYDVLDYWGQGTTVTVSS |
| SEQ ID NO: | VL | DIQMTQSPSFLSASVGDRVTITCKASQNVGDRVVWHQQKPG |
| 1361 | (CDRs underlined) | KAPKALIYSSSHRYKGVPSRFSGSGSGTEFTLTISSLQPEDFAT |
| | | YFCQQFKSYPLTFGQGTKLEIK |

A-H.78

| | | |
|---|---|---|
| SEQ ID NO: | HC CDR1 | GHDFKLTYIH |
| 3656 | | |
| SEQ ID NO: | HC CDR2 | RIYAGSGNTKYNEKFKG |
| 3663 | | |
| SEQ ID NO: 5 | HC CDR3 | SYYSYDVLDY |
| SEQ ID NO: | LC CDR1 | KASQNVGDRVV |
| 3662 | | |
| SEQ ID NO: | LC CDR2 | SSSHRYK |
| 3653 | | |
| SEQ ID NO: 8 | LC CDR3 | QQFKSYPLT |
| SEQ ID NO: | VH | QVQLVQSGAEVKKPGSSVKVSCKASGHDFKLTYIHWVRQAP |
| 1362 | (CDRs underlined) | GQGLEWMGRIYAGSGNTKYNEKFKGRVTITADTSTSTAYME |
| | | LSSLRSEDTAVYYCAVSYYSYDVLDYWGQGTTVTVSS |
| SEQ ID NO: | VL | DIQMTQSPSFLSASVGDRVTITCKASQNVGDRVVWHQQKPG |
| 1361 | (CDRs underlined) | KAPKALIYSSSHRYKGVPSRFSGSGSGTEFTLTISSLQPEDFAT |
| | | YFCQQFKSYPLTFGQGTKLEIK |

A-H.79

| | | |
|---|---|---|
| SEQ ID NO: | HC CDR1 | GHDFKLTYIH |
| 3656 | | |
| SEQ ID NO: | HC CDR2 | RVSAGSGNTKYNEKFKG |
| 3657 | | |
| SEQ ID NO: 5 | HC CDR3 | SYYSYDVLDY |
| SEQ ID NO: | LC CDR1 | RASQNVDNRLG |
| 3666 | | |
| SEQ ID NO: | LC CDR2 | SSSHRYK |
| 3653 | | |
| SEQ ID NO: 8 | LC CDR3 | QQFKSYPLT |
| SEQ ID NO: | VH | QVQLVQSGAEVKKPGSSVKVSCKASGHDFKLTYIHWVRQAP |
| 1350 | (CDRs underlined) | GQGLEWMGRVSAGSGNTKYNEKFKGRVTITADTSTSTAYME |
| | | LSSLRSEDTAVYYCAVSYYSYDVLDYWGQGTTVTVSS |
| SEQ ID NO: | VL | DIQMTQSPSFLSASVGDRVTITCRASQNVDNRLGWHQQKPG |
| 1365 | (CDRs underlined) | KAPKALIYSSSHRYKGVPSRFSGSGSGTEFTLTISSLQPEDFAT |
| | | YFCQQFKSYPLTFGQGTKLEIK |

A-H.80

| | | |
|---|---|---|
| SEQ ID NO: | HC CDR1 | GHDFKLTYIH |
| 3656 | | |
| SEQ ID NO: | HC CDR2 | RVSAGSGNTKYNEKFKG |
| 3657 | | |
| SEQ ID NO: 5 | HC CDR3 | SYYSYDVLDY |
| SEQ ID NO: | LC CDR1 | KASQNVDNRVA |
| 3667 | | |
| SEQ ID NO: | LC CDR2 | AASSLQK |
| 3668 | | |
| SEQ ID NO: 8 | LC CDR3 | QQFKSYPLT |
| SEQ ID NO: | VH | QVQLVQSGAEVKKPGSSVKVSCKASGHDFKLTYIHWVRQAP |
| 1350 | (CDRs underlined) | GQGLEWMGRVSAGSGNTKYNEKFKGRVTITADTSTSTAYME |
| | | LSSLRSEDTAVYYCAVSYYSYDVLDYWGQGTTVTVSS |
| SEQ ID NO: | VL | DIQMTQSPSFLSASVGDRVTITCKASQNVDNRVAWHQQKPG |
| 1367 | (CDRs underlined) | KAPKALIYAASSLQKGVPSRFSGSGSGTEFTLTISSLQPEDFAT |
| | | YFCQQFKSYPLTFGQGTKLEIK |

A-H.81

| | | |
|---|---|---|
| SEQ ID NO: | HC CDR1 | GHDFKLTYIH |
| 3656 | | |
| SEQ ID NO: | HC CDR2 | RVSAGSGNTKYNEKFKG |
| 3657 | | |
| SEQ ID NO: 5 | HC CDR3 | SYYSYDVLDY |
| SEQ ID NO: | LC CDR1 | KASQNVDNRVA |
| 3667 | | |
| SEQ ID NO: | LC CDR2 | SSSHRYK |
| 3653 | | |
| SEQ ID NO: | LC CDR3 | LQHNSYPLT |
| 3664 | | |
| SEQ ID NO: | VH | QVQLVQSGAEVKKPGSSVKVSCKASGHDFKLTYIHWVRQAP |
| 1350 | (CDRs underlined) | GQGLEWMGRVSAGSGNTKYNEKFKGRVTITADTSTSTAYME |
| | | LSSLRSEDTAVYYCAVSYYSYDVLDYWGQGTTVTVSS |
| SEQ ID NO: | VL | DIQMTQSPSFLSASVGDRVTITCKASQNVDNRVAWHQQKPG |
| 1369 | (CDRs underlined) | KAPKALIYSSSHRYKGVPSRFSGSGSGTEFTLTISSLQPEDFAT |
| | | YFCLQHNSYPLTFGQGTKLEIK |

A-H.82

| | | |
|---|---|---|
| SEQ ID NO: | HC CDR1 | GHDFKLTYIH |
| 3656 | | |
| SEQ ID NO: | HC CDR2 | RVSAGSGNVNYAQKFQG |
| 3665 | | |
| SEQ ID NO: 5 | HC CDR3 | SYYSYDVLDY |
| SEQ ID NO: | LC CDR1 | RASQNVDNRLG |
| 3666 | | |
| SEQ ID NO: | LC CDR2 | SSSHRYK |
| 3653 | | |
| SEQ ID NO: 8 | LC CDR3 | QQFKSYPLT |
| SEQ ID NO: | VH | QVQLVQSGAEVKKPGSSVKVSCKASGHDFKLTYIHWVRQAP |
| 1370 | (CDRs underlined) | GQGLEWMGRVSAGSGNVNYAQKFQGRVTITADTSTSTAYM |
| | | ELSSLRSEDTAVYYCAVSYYSYDVLDYWGQGTTVTVSS |
| SEQ ID NO: | VL | DIQMTQSPSFLSASVGDRVTITCRASQNVDNRLGWHQQKPG |
| 1365 | (CDRs underlined) | KAPKALIYSSSHRYKGVPSRFSGSGSGTEFTLTISSLQPEDFAT |
| | | YFCQQFKSYPLTFGQGTKLEIK |

A-H.83

| | | |
|---|---|---|
| SEQ ID NO: | HC CDR1 | GHDFKLTYIH |
| 3656 | | |
| SEQ ID NO: | HC CDR2 | RVSAGSGNVNYAQKFQG |
| 3665 | | |
| SEQ ID NO: 5 | HC CDR3 | SYYSYDVLDY |
| SEQ ID NO: | LC CDR1 | KASQNVDNRVA |
| 3667 | | |
| SEQ ID NO: | LC CDR2 | AASSLQK |
| 3668 | | |
| SEQ ID NO: 8 | LC CDR3 | QQFKSYPLT |
| SEQ ID NO: | VH | QVQLVQSGAEVKKPGSSVKVSCKASGHDFKLTYIHWVRQAP |
| 1370 | (CDRs underlined) | GQGLEWMGRVSAGSGNVNYAQKFQGRVTITADTSTSTAYM |
| | | ELSSLRSEDTAVYYCAVSYYSYDVLDYWGQGTTVTVSS |
| SEQ ID NO: | VL | DIQMTQSPSFLSASVGDRVTITCKASQNVDNRVAWHQQKPG |
| 1367 | (CDRs underlined) | KAPKALIYAASSLQKGVPSRFSGSGSGTEFTLTISSLQPEDFAT |
| | | YFCQQFKSYPLTFGQGTKLEIK |

A-H.84

| | | |
|---|---|---|
| SEQ ID NO: | HC CDR1 | GHDFKLTYIH |
| 3656 | | |
| SEQ ID NO: | HC CDR2 | RVSAGSGNVNYAQKFQG |
| 3665 | | |
| SEQ ID NO: 5 | HC CDR3 | SYYSYDVLDY |
| SEQ ID NO: | LC CDR1 | KASQNVDNRVA |
| 3667 | | |
| SEQ ID NO: | LC CDR2 | SSSHRYK |
| 3653 | | |
| SEQ ID NO: | LC CDR3 | LQHNSYPLT |
| 3664 | | |
| SEQ ID NO: | VH | QVQLVQSGAEVKKPGSSVKVSCKASGHDFKLTYIHWVRQAP |
| 1370 | (CDRs underlined) | GQGLEWMGRVSAGSGNVNYAQKFQGRVTITADTSTSTAYM |
| | | ELSSLRSEDTAVYYCAVSYYSYDVLDYWGQGTTVTVSS |
| SEQ ID NO: | VL | DIQMTQSPSFLSASVGDRVTITCKASQNVDNRVAWHQQKPG |
| 1369 | (CDRs underlined) | KAPKALIYSSSHRYKGVPSRFSGSGSGTEFTLTISSLQPEDFAT |
| | | YFCLQHNSYPLTFGQGTKLEIK |

A-H.85

| | | |
|---|---|---|
| SEQ ID NO: | HC CDR1 | GHDFRLTYIH |
| 3650 | | |
| SEQ ID NO: | HC CDR2 | RVSAGSGNTKYNEKFKG |
| 3657 | | |
| SEQ ID NO: 5 | HC CDR3 | SYYSYDVLDY |
| SEQ ID NO: | LC CDR1 | KASQNVGDRVV |
| 3662 | | |
| SEQ ID NO: | LC CDR2 | SSSHRYK |
| 3653 | | |
| SEQ ID NO: 8 | LC CDR3 | QQFKSYPLT |
| SEQ ID NO: | VH (CDRs underlined) | QVQLVQSGAEVKKPGSSVKVSCKASGHDFRLTYIHWVRQAP |
| 1344 | | GQGLEWMGRVSAGSGNTKYNEKFKGRVTITADTSTSTAYME |
| | | LSSLRSEDTAVYYCAVSYYSYDVLDYWGQGTTVTVSS |
| SEQ ID NO: | VL | DIQMTQSPSFLSASVGDRVTITCKASQNVGDRVVWHQQKPG |
| 1361 | (CDRs underlined) | KAPKALIYSSSHRYKGVPSRFSGSGSGTEFTLTISSLQPEDFAT |
| | | YFCQQFKSYPLTFGQGTKLEIK |

TABLE 2
Amino acid and nucleotide sequences for murine and humanized antibody molecules which bind
to TCRVB 12, e.g., TCRVB 12-3 or TCRVB 12-4. The antibody molecules include murine mAb
Antibody B and humanized mAb Antibody B-H.1 to B-H.6. The amino acid the heavy and light
chain CDRs, and the amino acid and nucleotide sequences of the heavy and light chain
variable regions, and the heavy and light chains are shown.
Antibody B (murine), also referred to as 16G8

| | | |
|---|---|---|
| SEQ ID NO: 17 | HC CDR1 (Combined) | GFTFSNFGMH |
| SEQ ID NO: 18 | HC CDR2 (Combined) | YISSGSSTIYYADTLKG |
| SEQ ID NO: 19 | HC CDR3 (Combined) | RGEGAMDY |
| SEQ ID NO: 57 | HC CDR1 (Kabat) | NFGMH |
| SEQ ID NO: 58 | HC CDR2 (Kabat) | YISSGSSTIYYADTLKG |
| SEQ ID NO: 59 | HC CDR3 (Kabat) | RGEGAMDY |
| SEQ ID NO: 60 | HC CDR1 (Chothia) | GFTFSNF |
| SEQ ID NO: 61 | HC CDR2 (Chothia) | SSGSST |
| SEQ ID NO: 62 | HC CDR3 (Chothia) | RGEGAMDY |
| SEQ ID NO: 15 | VH | DVQLVESGGGLVQPGGSRKLSCAASGFTFSNFGMHWVRQ |
| | | APDKGLEWVAYISSGSSTIYYADTLKGRFTISRDNPKNTLFL |
| | | QMTSLRSEDTAMYYCARRGEGAMDYWGQGTSVTVSS |
| SEQ ID NO: 20 | LC CDR1 (Combined) | RASSSVNYIY |
| SEQ ID NO: 21 | LC CDR2 (Combined) | YTSNLAP |
| SEQ ID NO: 22 | LC CDR3 (Combined) | QQFTSSPFT |
| SEQ ID NO: 63 | LC CDR1 (Kabat) | RASSSVNYIY |
| SEQ ID NO: 64 | LC CDR2 (Kabat) | YTSNLAP |
| SEQ ID NO: 65 | LC CDR3 (Kabat) | QQFTSSPFT |
| SEQ ID NO: 66 | LC CDR1 (Chothia) | RASSSVNYIY |
| SEQ ID NO: 67 | LC CDR2 (Chothia) | YTSNLAP |
| SEQ ID NO: 68 | LC CDR3 (Chothia) | QQFTSSPFT |
| SEQ ID NO: 16 | VL | ENVLTQSPAIMSASLGEKVTMSCRASSSVNYIYWYQQKSD |
| | | ASPKLWIYYTSNLAPGVPTRFSGSGSGNSYSLTISSMEGEDA |
| | | ATYYCQQFTSSPFTFGSGTKLEIK |

Antibody B humanized (B-H)
Antibody B-H.1A HC-1

| | | |
|---|---|---|
| SEQ ID NO: 17 | HC CDR1 (Combined) | GFTFSNFGMH |
| SEQ ID NO: 18 | HC CDR2 (Combined) | YISSGSSTIYYADTLKG |
| SEQ ID NO: 19 | HC CDR3 (Combined) | RGEGAMDY |
| SEQ ID NO: | VH | EVQLVESGGGLVQPGGSLRLSCAASGFTFSNFGMHWVRQA |
| 3438 | | PGKGLEWVSYISSGSSTIYYADTLKGRFTISRDNAKNSLYLQ |
| | | MNSLRAEDTAVYYCARRGEGAMDYWGQGTTVTVSS |
| SEQ ID NO: 31 | DNA VH | GAGGTGCAGCTGGTTGAATCTGGCGGAGGATTGGTTCAG |
| | | CCTGGCGGCTCTCTGAGACTGTCTTGTGCCGCTTCTGGCT |
| | | TCACCTTCTCCAACTTCGGCATGCACTGGGTCCGACAGG |
| | | CCCCTGGAAAAGGACTGGAATGGGTGTCCTACATCTCCT |
| | | CCGGCTCCTCCACCATCTACTACGCTGACACCCTGAAGG |
| | | GCAGATTCACCATCTCTCGGGACAACGCCAAGAACTCCC |
| | | TGTACCTGCAGATGAACAGCCTGAGAGCCGAGGACACC |
| | | GCCGTGTACTACTGTGCTAGAAGAGGCGAGGGCGCCATG |
| | | GATTATTGGGGCCAGGGAACCACAGTGACCGTGTCTAGC |

Antibody B-H.1B HC-2

| | | |
|---|---|---|
| SEQ ID NO: 17 | HC CDR1 (Combined) | GFTFSNFGMH |
| SEQ ID NO: 18 | HC CDR2 (Combined) | YISSGSSTIYYADTLKG |
| SEQ ID NO: 19 | HC CDR3 (Combined) | RGEGAMDY |
| SEQ ID NO: 25 | VH | EVQLVESGGGLVQPGGSLRLSCAASGFTFSNFGMHWVRQA |
| | | PGKGLEWVSYISSGSSTIYYADTLKGRFTISRDNSKNTLYLQ |
| | | MNSLRAEDTAVYYCARRGEGAMDYWGQGTTVTVSS |
| SEQ ID NO: 32 | DNA VH | GAGGTGCAGCTGGTTGAATCTGGCGGAGGATTGGTTCAG |
| | | CCTGGCGGCTCTCTGAGACTGTCTTGTGCCGCTTCTGGCT |
| | | TCACCTTCTCCAACTTCGGCATGCACTGGGTCCGACAGG |
| | | CCCCTGGAAAAGGACTGGAATGGGTGTCCTACATCTCCT |
| | | CCGGCTCCTCCACCATCTACTACGCTGACACCCTGAAGG |
| | | GCAGATTCACCATCAGCCGGGACAACTCCAAGAACACCC |
| | | TGTACCTGCAGATGAACTCCCTGAGAGCCGAGGACACCG |
| | | CCGTGTACTACTGTGCTAGAAGAGGCGAGGGCGCCATGG |
| | | ATTATTGGGGCCAGGGAACCACAGTGACCGTGTCTAGC |

Antibody B-H.1C HC-3

| | | |
|---|---|---|
| SEQ ID NO: 17 | HC CDR1 (Combined) | GFTFSNFGMH |
| SEQ ID NO: 18 | HC CDR2 (Combined) | YISSGSSTIYYADTLKG |
| SEQ ID NO: 19 | HC CDR3 (Combined) | RGEGAMDY |
| SEQ ID NO: 23 | VH | QVQLVESGGGVVQPGRSLRLSCAASGFTFSNFGMHWVRQ |
| | | APGKGLEWVAYISSGSSTIYYADTLKGRFTISRDNSKNTLY |
| | | LQMNSLRAEDTAVYYCARRGEGAMDYWGQGTTVTVSS |
| SEQ ID NO: 33 | DNA VH | CAGGTGCAGCTGGTGGAATCTGGTGGCGGAGTTGTGCAG |
| | | CCTGGCAGATCCCTGAGACTGTCTTGTGCCGCCTCTGGCT |
| | | TCACCTTCTCCAACTTCGGCATGCACTGGGTCCGACAGG |
| | | CCCCTGGAAAAGGATTGGAGTGGGTCGCCTACATCTCCT |
| | | CCGGCTCCTCCACCATCTACTACGCTGACACCCTGAAGG |
| | | GCAGATTCACCATCAGCCGGGACAACTCCAAGAACACCC |
| | | TGTACCTGCAGATGAACTCCCTGAGAGCCGAGGACACCG |
| | | CCGTGTACTACTGTGCTAGAAGAGGCGAGGGCGCCATGG |
| | | ATTATTGGGGCCAGGGAACCACAGTGACCGTGTCTAGC |

Antibody B-H.1D LC-1

| | | |
|---|---|---|
| SEQ ID NO: 20 | LC CDR1 (Combined) | RASSSVNYIY |
| SEQ ID NO: 21 | LC CDR2 (Combined) | YTSNLAP |
| SEQ ID NO: 22 | LC CDR3 (Combined) | QQFTSSPFT |
| SEQ ID NO: 26 | VL | DNQLTQSPSFLSASVGDRVTITCRASSSVNYIYWYQQKPGK |
| | | APKLLIYYTSNLAPGVPSRFSGSGSGNEYTLTISSLQPEDFAT |
| | | YYCQQFTSSPFTFGQGTKLEIK |
| SEQ ID NO: 34 | DNA VL | GATAACCAGCTGACCCAGTCTCCTAGCTTCCTGTCTGCCT |
| | | CTGTGGGCGACAGAGTGACAATTACCTGCCGGGCCTCCT |
| | | CCTCCGTGAACTACATCTACTGGTATCAGCAGAAGCCCG |
| | | GCAAGGCCCCTAAGCTGCTGATCTACTACACCTCCAATC |
| | | TGGCCCCTGGCGTGCCCTCTAGATTTTCCGGATCTGGCTC |
| | | CGGCAACGAGTATACCCTGACAATCTCCAGCCTGCAGCC |
| | | TGAGGACTTCGCCACCTACTACTGCCAGCAGTTCACCTC |
| | | CTCTCCATTCACCTTTGGCCAGGGCACCAAGCTGGAAAT |
| | | CAAA |

Antibody B-H.1E LC-2

| | | |
|---|---|---|
| SEQ ID NO: 20 | LC CDR1 (Combined) | RASSSVNYIY |
| SEQ ID NO: 21 | LC CDR2 (Combined) | YTSNLAP |
| SEQ ID NO: 22 | LC CDR3 (Combined) | QQFTSSPFT |
| SEQ ID NO: 27 | VL | DNQLTQSPSSLSASVGDRVTITCRASSSVNYIYWYQQKPGK |
| | | APKLLIYYTSNLAPGVPSRFSGSGSGNDYTLTISSLQPEDFA |
| | | TYYCQQFTSSPFTFGQGTKLEIK |
| SEQ ID NO: 35 | DNA VL | ATAACCAGCTGACCCAGTCTCCTTCCAGCCTGTCTGCTTC |
| | | TGTGGGCGACAGAGTGACAATTACCTGCCGGGCCTCCTC |
| | | CTCCGTGAACTACATCTACTGGTATCAGCAGAAGCCCGG |
| | | CAAGGCCCCTAAGCTGCTGATCTACTACACCTCCAATCT |
| | | GGCCCCTGGCGTGCCCTCTAGATTTTCCGGATCTGGCTCC |
| | | GGCAACGACTATACCCTGACAATCTCCAGCCTGCAGCCT |
| | | GAGGACTTCGCCACCTACTACTGCCAGCAGTTCACCTCC |
| | | TCTCCATTCACCTTTGGCCAGGGCACCAAGCTGGAAATC |
| | | AAA |

Antibody B-H.1F LC-3

| | | |
|---|---|---|
| SEQ ID NO: 20 | LC CDR1 (Combined) | RASSSVNYIY |
| SEQ ID NO: 21 | LC CDR2 (Combined) | YTSNLAP |
| SEQ ID NO: 22 | LC CDR3 (Combined) | QQFTSSPFT |
| SEQ ID NO: 28 | VL | ENVLTQSPATLSVSPGERATLSCRASSSVNYIYWYQQKPGQ |
| | | APRLLIYYTSNLAPGIPARFSGSGSGNEYTLTISSLQSEDFAV |
| | | YYCQQFTSSPFTFGQGTKLEIK |
| SEQ ID NO: 36 | DNA VL | GAGAATGTGCTGACCCAGTCTCCTGCCACACTGTCTGTT |
| | | AGCCCTGGCGAGAGAGCTACCCTGAGCTGCAGAGCCTCT |
| | | TCCTCCGTGAACTACATCTACTGGTATCAGCAGAAGCCC |
| | | GGCCAGGCTCCTAGACTGCTGATCTACTACACCTCCAAT |
| | | CTGGCCCCTGGCATCCCTGCCAGATTTTCCGGATCTGGCT |
| | | CCGGCAACGAGTATACCCTGACCATCTCCAGCCTGCAGT |
| | | CCGAGGACTTTGCTGTGTACTATTGCCAGCAGTTCACAA |
| | | GCAGCCCTTTCACCTTTGGCCAGGGCACCAAGCTGGAAA |
| | | TCAAA |

Antibody B-H.1G LC-4

| | | |
|---|---|---|
| SEQ ID NO: 20 | LC CDR1 (Combined) | RASSSVNYIY |
| SEQ ID NO: 21 | LC CDR2 (Combined) | YTSNLAP |
| SEQ ID NO: 22 | LC CDR3 (Combined) | QQFTSSPFT |
| SEQ ID NO: 29 | VL | QNVLTQPPSASGTPGQRVTISCRASSSVNYIYWYQQLPGTA |
| | | PKLLIYYTSNLAPGVPDRFSGSGSGNSYSLAISGLRSEDEAD |
| | | YYCQQFTSSPFTFGTGTKVTVL |
| SEQ ID NO: 37 | DNA VL | CAGAATGTGCTGACCCAACCTCCTTCCGCCTCTGGCACA |
| | | CCTGGACAGAGAGTGACAATCTCCTGCCGGGCCTCCTCC |
| | | TCCGTGAACTACATCTACTGGTATCAGCAGCTGCCCGGC |
| | | ACCGCTCCTAAACTGCTGATCTACTACACCTCCAATCTG |
| | | GCCCCTGGCGTGCCCGATAGATTTTCCGGATCTGGCTCC |
| | | GGCAACTCCTACAGCCTGGCTATCTCTGGCCTGAGATCT |
| | | GAGGACGAGGCCGACTACTACTGCCAGCAGTTCACCTCC |
| | | TCTCCATTCACCTTTGGCACCGGCACCAAAGTGACAGTT |
| | | CTT |

Antibody B-H.1H LC-5

| | | |
|---|---|---|
| SEQ ID NO: 20 | LC CDR1 (Combined) | RASSSVNYIY |
| SEQ ID NO: 21 | LC CDR2 (Combined) | YTSNLAP |
| SEQ ID NO: 22 | LC CDR3 (Combined) | QQFTSSPFT |
| SEQ ID NO: 30 | VL | SNELTQPPSVSVSPGQTARITCRASSSVNYIYWYQQKSGQA |
| | | PVLVIYYTSNLAPGIPERFSGSGSGNMYTLTISGAQVEDEAD |
| | | YYCQQFTSSPFTFGTGTKVTVL |
| SEQ ID NO: 38 | DNA VL | TCTAATGAGCTGACCCAGCCTCCTTCCGTGTCCGTGTCTC |
| | | CTGGACAGACCGCCAGAATTACCTGCCGGGCCTCCTCCT |
| | | CCGTGAACTACATCTACTGGTATCAGCAGAAGTCCGGCC |
| | | AGGCTCCTGTGCTCGTGATCTACTACACCTCCAATCTGGC |
| | | CCCTGGCATCCCTGAGAGATTCTCCGGATCTGGCTCCGG |
| | | CAACATGTACACCCTGACCATCTCTGGCGCCCAGGTGGA |
| | | AGATGAGGCCGACTACTACTGCCAGCAGTTCACCTCCTC |
| | | TCCATTCACCTTTGGCACCGGCACCAAAGTGACAGTTCT |
| | | T |

Antibody B-H.1

| | | |
|---|---|---|
| SEQ ID NO: | Chain1: Fc only | METDTLLLWVLLLWVPGSTGDKTHTCPPCPAPELLGGPSV |
| 3280 | | FLFPPKPKDTLMISRTPEVTCVVVDVSHEDPEVKFNWYVD |
| | | GVEVHNAKTKPREEQYNSTYRVVSVLTVLHQDWLNGKEY |
| | | KCKVSNKALPAPIEKTISKAKGQPREPQVYTLPPCREEMTK |
| | | NQVSLWCLVKGFYPSDIAVEWESNGQPENNYKTTPPVLDS |
| | | DGSFFLYSKLTVDKSRWQQGNVFSCSVMHEALHNRFTQKS |
| | | LSLSPGK |
| SEQ ID NO: | Chain2: humanized B- | METDTLLLWVLLLWVPGSTGEVQLVESGGGLVQPGGSLRL |
| 3281 | H scFv | SCAASGFTFSNFGMHWVRQAPGKGLEWVSYISSGSSTIYYA |
| | | DTLKGRFTISRDNSKNTLYLQMNSLRAEDTAVYYCARRGE |
| | | GAMDYWGQGTTVTVSSGGGGSGGGGSGGGGSGGGGSDN |
| | | QLTQSPSFLSASVGDRVTITCRASSSVNYIYWYQQKPGKAP |
| | | KLLIYYTSNLAPGVPSRFSGSGSGNEYTLTISSLQPEDFATY |
| | | YCQQFTSSPFTFGQGTKLEIKGGGGSDKTHTCPPCPAPELLG |
| | | GPSVFLFPPKPKDTLMISRTPEVTCVVVDVSHEDPEVKFNW |
| | | YVDGVEVHNAKTKPREEQYNSTYRVVSVLTVLHQDWLNG |
| | | KEYKCKVSNKALPAPIEKTISKAKGQPREPQVCTLPPSREE |
| | | MTKNQVSLSCAVKGFYPSDIAVEWESNGQPENNYKTTPPV |
| | | LDSDGSFFLVSKLTVDKSRWQQGNVFSCSVMHEALHNHYT |
| | | QKSLSLSPGKGGGGSGGGGSGLNDIFEAQKIEWHE |
| SEQ ID NO: | scFv | EVQLVESGGGLVQPGGSLRLSCAASGFTFSNFGMHWVRQA |
| 3642 | | PGKGLEWVSYISSGSSTIYYADTLKGRFTISRDNSKNTLYLQ |
| | | MNSLRAEDTAVYYCARRGEGAMDYWGQGTTVTVSSGGG |
| | | GSGGGGSGGGGSGGGGSDNQLTQSPSFLSASVGDRVTITCR |
| | | ASSSVNYIYWYQQKPGKAPKLLIYYTSNLAPGVPSRFSGSG |
| | | SGNEYTLTISSLQPEDFATYYCQQFTSSPFTFGQGTKLEIK |

Antibody B-H.2

| | | |
|---|---|---|
| SEQ ID NO: | scFv | EVQLVESGGGLVQPGGSLRLSCAASGFTFSNFGMHWVRQA |
| 1338 | | PGKGLEWVSYISSGSSTIYYADTLKGRFTISRDNSKNTLYLQ |
| | | MNSLRAEDTAVYYCARRGEGAMDYWGQGTTVTVSSGGG |
| | | GSGGGGSGGGGSGGGGSDNQLTQSPSSLSASVGDRVTITCR |
| | | ASSSVNYIYWYQQKPGKAPKLLIYYTSNLAPGVPSRFSGSG |
| | | SGNDYTLTISSLQPEDFATYYCQQFTSSPFTFGQGTKLEIK |

Antibody B-H.3

| | | |
|---|---|---|
| SEQ ID NO: | scFv | EVQLVESGGGLVQPGGSLRLSCAASGFTFSNFGMHWVRQA |
| 1339 | | PGKGLEWVSYISSGSSTIYYADTLKGRFTISRDNSKNTLYLQ |
| | | MNSLRAEDTAVYYCARRGEGAMDYWGQGTTVTVSSGGG |
| | | GSGGGGSGGGGSGGGGSSNELTQPPSVSVSPGQTARITCRA |
| | | SSSVNYIYWYQQKSGQAPVLVIYYTSNLAPGIPERFSGSGSG |
| | | NMYTLTISGAQVEDEADYYCQQFTSSPFTFGTGTKVTVL |

Antibody B-H.4

| | | |
|---|---|---|
| SEQ ID NO: | scFv | QVQLVESGGGVVQPGRSLRLSCAASGFTFSNFGMHWVRQ |
| 1340 | | APGKGLEWVAYISSGSSTIYYADTLKGRFTISRDNSKNTLY |
| | | LQMNSLRAEDTAVYYCARRGEGAMDYWGQGTTVTVSSG |
| | | GGGSGGGGSGGGGSGGGGSDNQLTQSPSFLSASVGDRVTI |
| | | TCRASSSVNYIYWYQQKPGKAPKLLIYYTSNLAPGVPSRFS |
| | | GSGSGNEYTLTISSLQPEDFATYYCQQFTSSPFTFGQGTKLEI |
| | | K |

Antibody B-H.5

| | | |
|---|---|---|
| SEQ ID NO: | scFv | QVQLVESGGGVVQPGRSLRLSCAASGFTFSNFGMHWVRQ |
| 1341 | | APGKGLEWVAYISSGSSTIYYADTLKGRFTISRDNSKNTLY |
| | | LQMNSLRAEDTAVYYCARRGEGAMDYWGQGTTVTVSSG |
| | | GGGSGGGGSGGGGSGGGGSDNQLTQSPSSLSASVGDRVTI |
| | | TCRASSSVNYIYWYQQKPGKAPKLLIYYTSNLAPGVPSRFS |
| | | GSGSGNDYTLTISSLQPEDFATYYCQQFTSSPFTFGQGTKLE |
| | | IK |

Antibody B-H.6

| | | |
|---|---|---|
| SEQ ID NO: | scFv | QVQLVESGGGVVQPGRSLRLSCAASGFTFSNFGMHWVRQ |
| 1342 | | APGKGLEWVAYISSGSSTIYYADTLKGRFTISRDNSKNTLY |
| | | LQMNSLRAEDTAVYYCARRGEGAMDYWGQGTTVTVSSG |
| | | GGGSGGGGSGGGGSGGGGSSNELTQPPSVSVSPGQTARITC |
| | | RASSSVNYIYWYQQKSGQAPVLVIYYTSNLAPGIPERFSGS |
| | | GSGNMYTLTISGAQVEDEADYYCQQFTSSPFTFGTGTKVTV |
| | | L |

TABLE 3
Constant region amino acid sequences of human IgG heavy chains and human kappa light chain

| | | |
|---|---|---|
| Human kappa | LC | RTVAAPSVFI FPPSDEQLKS GTASVVCLLN NFYPREAKVQ WKVDNALQSG |
| constant region | | NSQESVTEQD SKDSTYSLSS TLTLSKADYE KHKVYACEVT HQGLSSPVTK |
| SEQ ID NO: 39 | | SFNRGEC |
| Human | LC | RTVAAPSVFIFPPSDEQLKSGTASVVCLLNNFYPREAKVQWKVDNALQSGNSQ |
| Immunoglobulin | | ESVTEQDSKDSTYSLSSTLTLSKADYEKHKVYACEVTHQGLSSPVTKSFNRGE |
| kappa constant C | | C |
| region | | |
| SEQ ID NO: 3644 | | |
| IgG4 (S228P) | HC | ASTKGPSVFPLAPCSRSTSESTAALGCLVKDYFPEPVTVSWNSGALTSGVHTFP |
| mutant constant | | AVLQSSGLYSLSSVVTVPSSSLGTKTYTCNVDHKPSNTKVDKRVESKYGPPCPP |
| region (EU | | CPAPEFLGGPSVFLFPPKPKDTLMISRTPEVTCVVVDVSQEDPEVQFNWYVDG |
| Numbering) | | VEVHNAKTKPREEQFNSTYRVVSVLTVLHQDWLNGKEYKCKVSNKGLPSSIE |
| SEQ ID NO: 40 | | KTISKAKGQPREPQVYTLPPSQEEMTKNQVSLTCLVKGFYPSDIAVEWESNGQ |
| | | PENNYKTTPPVLDSDGSFFLYSRLTVDKSRWQEGNVFSCSVMHEALHNHYTQ |
| | | KSLSLSLG |
| IgG1 wild type | HC | ASTKGPSVFPLAPSSKSTSGGTAALGCLVKDYFPEPVTVSWNSGALTSGVHTFP |
| SEQ ID NO: 41 | | AVLQSSGLYSLSSVVTVPSSSLGTQTYICNVNHKPSNTKVDKRVEPKSCDKTHT |
| | | CPPCPAPELLGGPSVFLFPPKPKDTLMISRTPEVTCVVVDVSHEDPEVKFNWYV |
| | | DGVEVHNAKTKPREEQYNSTYRVVSVLTVLHQDWLNGKEYKCKVSNKALPA |
| | | PIEKTISKAKGQPREPQVYTLPPSREEMTKNQVSLTCLVKGFYPSDIAVEWESN |
| | | GQPENNYKTTPPVLDSDGSFFLYSKLTVDKSRWQQGNVFSCSVMHEALHNHY |
| | | TQKSLSLSPGK |
| IgG1 (N297A) | HC | ASTKGPSVFPLAPSSKSTSGGTAALGCLVKDYFPEPVTVSWNSGALTSGVHTFP |
| mutant constant | | AVLQSSGLYSLSSVVTVPSSSLGTQTYICNVNHKPSNTKVDKRVEPKSCDKTHT |
| region (EU | | CPPCPAPELLGGPSVFLFPPKPKDTLMISRTPEVTCVVVDVSHEDPEVKFNWYV |
| Numbering) | | DGVEVHNAKTKPREEQYASTYRVVSVLTVLHQDWLNGKEYKCKVSNKALPA |
| SEQ ID NO: 42 | | PIEKTISKAKGQPREPQVYTLPPSREEMTKNQVSLTCLVKGFYPSDIAVEWESN |
| | | GQPENNYKTTPPVLDSDGSFFLYSKLTVDKSRWQQGNVFSCSVMHEALHNHY |
| | | TQKSLSLSPGK |
| IgM constant | HC | GSASAPTLFPLVSCENSPSDTSSVAVGCLAQDFLPDSITFSWKYKNNSDISSTRG |
| delta CDC | | FPSVLRGGKYAATSQVLLPSKDVMQGTDEHVVCKVQHPNGNKEKNVPLPVIA |
| (P311A, P313S) | | ELPPKVSVFVPPRDGFFGNPRKSKLICQATGFSPRQIQVSWLREGKQVGSGVTT |
| SEQ ID NO: 73 | | DQVQAEAKESGPTTYKVTSTLTIKESDWLGQSMFTCRVDHRGLTFQQNASSM |
| | | CVPDQDTAIRVFAIPPSFASIFLTKSTKLTCLVTDLTTYDSVTISWTRQNGEAVK |
| | | THTNISESHPNATFSAVGEASICEDDWNSGERFTCTVTHTDLASSLKQTISRPKG |
| | | VALHRPDVYLLPPAREQLNLRESATITCLVTGFSPADVFVQWMQRGQPLSPEK |
| | | YVTSAPMPEPQAPGRYFAHSILTVSEEEWNTGETYTCVVAHEALPNRVTERTV |
| | | DKSTGKPTLYNVSLVMSDTAGTCY |
| IgGA1 | HC | ASPTSPKVFPLSLCSTQPDGNVVIACLVQGFFPQEPLSVTWSESGQGVTARNFPP |
| SEQ ID NO: 74 | | SQDASGDLYTTSSQLTLPATQCLAGKSVTCHVKHYTNPSQDVTVPCPVPSTPPT |
| | | PSPSTPPTPSPSCCHPRLSLHRPALEDLLLGSEANLTCTLTGLRDASGVTFTWTP |
| | | SSGKSAVQGPPERDLCGCYSVSSVLPGCAEPWNHGKTFTCTAAYPESKTPLTA |
| | | TLSKSGNTFRPEVHLLPPPSEELALNELVTLTCLARGFSPKDVLVRWLQGSQEL |
| | | PREKYLTWASRQEPSQGTTTFAVTSILRVAAEDWKKGDTFSCMVGHEALPLAF |
| | | TQKTIDRLAGKPTHVNVSVVMAEVDGTCY |
| IgGA2 | HC | ASPTSPKVFPLSLDSTPQDGNVVVACLVQGFFPQEPLSVTWSESGQNVTARNFP |
| SEQ ID NO: 75 | | PSQDASGDLYTTSSQLTLPATQCPDGKSVTCHVKHYTNSSQDVTVPCRVPPPPP |
| | | CCHPRLSLHRPALEDLLLGSEANLTCTLTGLRDASGATFTWTPSSGKSAVQGPP |
| | | ERDLCGCYSVSSVLPGCAQPWNHGETFTCTAAHPELKTPLTANITKSGNTFRPE |
| | | VHLLPPPSEELALNELVTLTCLARGFSPKDVLVRWLQGSQELPREKYLTWASR |
| | | QEPSQGTTTYAVTSILRVAAEDWKKGETFSCMVGHEALPLAFTQKTIDRMAG |
| | | KPTHINVSVVMAEADGTCY |
| Human Ig_J chain | HC | MKNHLLFWGVLAVFIKAVHVKAQEDERIVLVDNKCKCARITSRIIRSSEDPNED |
| SEQ ID NO: 76 | | IVERNIRIIVPLNNRENISDPTSPLRTRFVYHLSDLCKKCDPTEVELDNQIVTATQ |
| | | SNICDEDSATETCYTYDRNKCYTAVVPLVYGGETKMVETALTPDACYPD |
| Human | HC | ASTKGPSVFPLAPSSKSTSGGTAALGCLVKDYFPEPVTVSWNSGALTSGVHTFP |
| Immunoglobulin | | AVLQSSGLYSLSSVVTVPSSSLGTQTYICNVNHKPSNTKVDKKVEPKSCDKTHT |
| heavy chain | | CPPCPAPELLGGPSVFLFPPKPKDTLMISRTPEVTCVVVDVSHEDPEVKFNWYV |
| SEQ ID NO: 3645 | | DGVEVHNAKTKPREEQYASTYRVVSVLTVLHQDWLNGKEYKCKVSNKALPA |
| | | PIEKTISKAKGQPREPQVYTLPPSREEMTKNQVSLTCLVKGFYPSDIAVEWESN |
| | | GQPENNYKTTPPVLDSDGSFFLYSKLTVDKSRWQQGNVFSCSVMHEALHNHY |
| | | TQKSLSLSPGK |
| Human | HC | ASTKGPSVFPLAPSSKSTSGGTAALGCLVKDYFPEPVTVSWNSGALTSGVHTFP |
| Immunoglobulin | | AVLQSSGLYSLSSVVTVPSSSLGTQTYICNVNHKPSNTKVDKKVEPKSCDKTHT |
| heavy chain | | CPPCPAPELLGGPSVFLFPPKPKDTLMISRTPEVTCVVVDVSHEDPEVKFNWYV |
| SEQ ID NO: 3646 | | DGVEVHNAKTKPREEQYASTYRVVSVLTVLHQDWLNGKEYKCKVSNKALPA |
| | | PIEKTISKAKGQPREPQVYTLPPSREEMTKNQVSLTCLVKGFYPSDIAVEWESN |
| | | GQPENNYKTTPPVLDSDGSFFLYSKLTVDKSRWQQGNVFSCSVMHEALHNHY |
| | | TQKSLSLSPGKEPEA |
| Human | HC | ASTKGPSVFPLAPSSKSTSGGTAALGCLVKDYFPEPVTVSWNSGALTSGVHTFP |
| Immunoglobulin | | AVLQSSGLYSLSSVVTVPSSSLGTQTYICNVNHKPSNTKVDKRVEPKSCDKTHT |
| heavy chain | | CPPCPAPELLGGPSVFLFPPKPKDTLMISRTPEVTCVVVDVSHEDPEVKFNWYV |
| SEQ ID NO: 3647 | | DGVEVHNAKTKPREEQYNSTYRVVSVLTVLHQDWLNGKEYKCKVSNKALPA |
| | | PIEKTISKAKGQPREPQVYTLPPSREEMTKNQVSLTCLVKGFYPSDIAVEWESN |
| | | GQPENNYKTTPPVLDSDGSFFLYSKLTVDKSRWQQGNVFSCSVMHEALHNHY |
| | | TQKSLSLSPGK |
| Human Fc Knob | HC | DKTHTCPPCPAPELLGGPSVFLFPPKPKDTLMISRTPEVTCVVVDVSHEDPEVK |
| cys N297A | | FNWYVDQVEVHNAKTKPREEQYASTYRVVSVLTVLHQDWLNGKEYKCKVS |
| SEQ ID NO: 3648 | | NKALPAPIEKTISKAKGQPREPQVYTLPPCREEMTKNQVSLWCLVKGFYPSDIA |
| | | VEWESNGQPENNYKTTPPVLDSDGSFFLYSKLTVDKSRWQQGNVFSCSVMHE |
| | | ALHNHYTQKSLSLSPGK |
| Human IgGI hole | HC | ASTKGPSVFPLAPSSKSTSGGTAALGCLVKDYFPEPVTVSWNSGALTSGVHTFP |
| cys N297A | | AVLQSSGLYSLSSVVTVPSSSLGTQTYICNVNHKPSNTKVDKRVEPKSCDKTHT |
| SEQ ID NO: 3649 | | CPPCPAPELLGGPSVFLFPPKPKDTLMISRTPEVTCVVVDVSHEDPEVKFNWYV |
| | | DGVEVHNAKTKPREEQYASTYRVVSVLTVLHQDWLNGKEYKCKVSNKALPA |
| | | PIEKTISKAKGQPREPQVCTLPPSREEMTKNQVSLSCAVKGFYPSDIAVEWESN |
| | | GQPENNYKTTPPVLDSDGSFFLVSKLTVDKSRWQQGNVFSCSVMHEALHNHY |
| | | TQKSLSLSPGK |

TABLE 4
Exemplary Fc KiH mutations and optional Cysteine mutations

| Position | Knob Mutation | Hole Mutation |
|---|---|---|
| T366 | T366W | T366S |
| L368 | — | L368A |
| Y407 | — | Y407V |

Additional Cysteine Mutations to form a stabilizing disulfide bridge

| Position | Knob CH3 | Hole CH3 |
|---|---|---|
| S354 | S354C | — |
| Y349 | — | Y349C |

TABLE 5
CRS grading

| | |
|---|---|
| Gr1 | Supportive care only |
| Gr2 | IV therapies +/− hospitalization. |
| Gr3 | Hypotension requiring IV fluids or low-dose vasoactives |
| | or hypoxemia requiring oxygen, CPAP, or BIPAP. |
| Gr4 | Hypotension requiring high-dose vasoactives or |
| | hypoxemia requiring mechanical ventilation. |
| Gr 5 | Death |

TABLE 6
CTCAE v 4.0 CRS grading scale

| CRS grade | Characteristics |
|---|---|
| Grade 1 | Mild; No infusion interruption; No intervention |
| Grade 2 | Infusion interruption indicated but responds promptly to symptomatic treatment (e.g., |
| | antihistamines, NSAIDS, narcotics, IV fluids); prophylactic medications indicated for <=24 hrs |
| Grade 3 | Prolonged (e.g., not rapidly responsive to symptomatic medications and/or brief interruption of |
| | infusion); recurrence of symptoms following initial improvement; hospitalization indicated for |
| | clinical sequelae (e.g., renal impairment, pulmonary infiltrates) |
| Grade 4 | Life threatening consequences; pressor or ventilator support |

TABLE 7
NCI CRS grading scale

| CRS grade | Characteristics |
|---|---|
| Grade 1 | Symptoms are not life threatening and require symptomatic treatment only; e.g., fever, nausea, |
| | fatigue, headache, myalgias, malaise |
| Grade 2 | Symptoms require and respond to moderate intervention; Oxygen requirement <40% or |
| | hypotension responsive to fluids or low dose pressors or Grade 2 organ toxicity |
| Grade 3 | Symptoms require and respond to aggressive intervention; Oxygen requirement >=40% or |
| | Hypotension requiring high dose or multiple pressors or grade 3 organ toxicity or grade 4 |
| | transaminitis |
| Grade 4 | Life threatening symptoms Requirement for ventilator support or Grade 4; organ toxicity |
| | (excluding transaminitis) |

TABLE 8A
List of TCRβV subfamilies and subfamily members

| Reference in | | |
|---|---|---|
| FIG. 5 | Subfamily | Subfamily members |
| A | TCRβ V6 | TCRβ V6-4*01, TCRβ V6-4*02, TCRβ V6-9*01, TCRβ V6-8*01, |
| | Also referred to as: | TCRβ V6-5*01, TCRβ V6-6*02, TCRβ V6-6*01, TCRβ V6-2*01, |
| | TCR VB 13.1 | TCRβ V6-3*01 or TCRβ V6-1*01. |
| B | TCRβ V10 | TCRβ V10-1*01, TCRβ V10-1*02, TCRβ V10-3*01 or TCRβ V10-2*01 |
| | Also referred to as: | |
| | TCRβ V12 | |
| C | TCRβ V12 | TCRβ V12-4*01, TCRβ V12-3*01, or TCRβ V12-5*01 |
| | Also referred to as: | |
| | TCRβ V8.1 | |
| D | TCRβ V5 | TCRβ V5-5*01, TCRβ V5-6*01, TCRβ V5-4*01, TCRβ V5-8*01, |
| | | TCRβ V5-1*01 |
| E | TCRβ V7 | TCRβ V7-7*01, TCRβ V7-6*01, TCRβ V7 -8*02, TCRβ V7 -4*01, |
| | | TCRβ V7-2*02, TCRβ V7-2*03, TCRβ V7-2*01, TCRβ V7-3*01, |
| | | TCRβ V7-9*03, or TCRβ V7-9*01 |
| F | TCRβ V11 | TCRβ V11-1*01, TCRβ V11-2*01 or TCRβ V11-3*01 |
| G | TCRβ V14 | TCRβ V14*01 |
| H | TCRβ V16 | TCRβ V16*01 |
| I | TCRβ V18 | TCRβ V18*01 |
| J | TCRβ V9 | TCRβ V9*01 or TCRβ V9*02 |
| K | TCRβ V13 | TCRβ V13*01 |
| L | TCRβ V4 | TCRβ V4-2*01, TCRβ V4-3*01, or TCRβ V4-1*01 |
| M | TCRβ V3 | TCRβ V3-1*01 |
| N | TCRβ V2 | TCRβ V2*01 |
| O | TCRβ V15 | TCRβ V15*01 |
| P | TCRβ V30 | TCRβ V30*01, or TCRβ V30*02 |
| Q | TCRβ V19 | TCRβ V19*01, or TCRβ V19*02 |
| R | TCRβ V27 | TCRβ V27*01. |
| S | TCRβ V28 | TCRβ V28*01. |
| T | TCRβ V24 | TCRβ V24-1*01 |
| U | TCRβ V20 | TCRβ V20-1*01, or TCRβ V20-1*02 |
| V | TCRβ V25 | TCRβ V25-1*01 |
| W | TCRβ V29 | TCRβ V29-1*01 |

TABLE 8B
Additional TCRβV subfamilies

Subfamily
TCRβ V1
TCRβ V17
TCRβ V21
TCRβ V23
TCRβ V26

TABLE 10A
Exemplary anti-TCRβV antibody molecules

| TRBV | TRBV | Reagents monoclonal antibodies | | |
|---|---|---|---|---|
| gene name | allele name | Clone name and Specificity | Company product | Isotype |
| TRBV2 | TRBV2*01 | IsMMU 546 (TRBV2) | Serotec V BETA 22 | Mouse IgG1 |
| | TRBV2*02 | | Coulter Vbeta22 | |
| | TRBV2*03 | | | |
| TRBV3-1 | TRBV3-1*01 | FIN9 (TRBV3-1) | Serotec Vbeta9 | Mouse IgG2a |
| | | | Coulter Vbeta9 | |
| | TRBV3-1*02 | AMKB1-2 (TRBV3-1) | BD Biosciences Vbeta9 | Mouse IgG1 |
| TRBV4-1 | TRBV4-1*01 | ZOE (TRBV4-1, TRBV4-2, | Serotec V BETA 7 | Mouse IgG2a |
| | | TRBV4-3) | Coulter Vbeta7 | |
| | TRBV4-1*02 | 3G5 (TRBV4-1) | Pierce EndogenV beta 7.1 | Mouse IgG2b |
| TRBV4-2 | TRBV4-2*01 | ZOE (TRBV4-1, TRBV4-2, | Serotec V BETA 7 | Mouse IgG2a |
| | TRBV4-2*02 | TRBV4-3) | Coulter Vbeta7 | |
| TRBV4-3 | TRBV4-3*01 | ZOE (TRBV4-1, TRBV4-2, | Serotec V BETA 7 | Mouse IgG2a |
| | TRBV4-3*02 | TRBV4-3) | Coulter Vbeta7 | |
| | TRBV4-3*03 | | | |
| | TRBV4-3*04 | ZIZOU4 (TRBV4-3) | Coulter Vbeta7.2 | Mouse IgG2a |
| TRBV5-1 | TRBV5-1*01 | IMMU157 (TRBV5-1) | Serotec Vbeta5.1 | Mouse IgG2a |
| | | | Coulter Vbeta5.1 | |
| | TRBV5-1*02 | LC4 (TRBV5-1) | Pierce Endogen V beta 5(c) | Mouse IgG1 |
| | | | BD Biosciences Vbeta5(c) | |
| TRBV5-4 | TRBV5-4*01 | | | |
| | TRBV5-4*02 | | | |
| | TRBV5-4*03 | | | |
| | TRBV5-4*04 | | | |
| TRBV5-5 | TRBV5-5*01 | 3D11 (TRBV5-5) | Serotec VBETA5.3 | Mouse IgG1 |
| | | | Coulter Vbeta5.3 | |
| | TRBV5-5*02 | 1C1 (TRBV5-5, TRBV5-6) | Pierce Endogen V beta 5(a) | Mouse IgG1 |
| | | | BD Biosciences Vbeta5(a) | |
| | TRBV5-5*03 | W112 (TRBV5-5) | Pierce Endogen V beta 5(b) | Mouse IgG1 |
| | | | Serotec V beta 5.2/5.3 | |
| | | MH3-2 (TRBV5-5, | BD Biosciences Vbeta5(b) | |
| | | TRBV5-6) | BD Biosciences Vbeta5 | Mouse IgG2a |
| | | 4H11 (TM27) as disclosed | | |
| | | in U.S. Pat. No. 5,861,155 | | |
| TRBV5-6 | TRBV5-6*01 | 36213 (TRBV5-6) | Serotec Vbeta5.2 | Mouse IgG1 |
| | | 1C1 (TRBV5-5, TRBV5-6) | BD Biosciences Vbeta5(a) | Mouse IgG1 |
| | | MH3-2 (TRBV5-5, | BD Biosciences Vbeta5 | Mouse IgG2a |
| | | TRBV5-6) | | |
| TRBV5-8 | TRBV5-8*01 | | | |
| | TRBV5-8*02 | | | |
| TRBV6-1 | TRBV6-1*01 | BAM13 (TRBV6-1, | Pierce Endogen V beta 13 | Mouse IgG1 |
| | | TRBV6-5) | BD Biosciences Vbeta13.1, | |
| | | | 13.3 | |
| TRBV6-2 | TRBV6-2*01 | H132 | Coulter Vbeta13.2 | Mouse IgG1 |
| TRBV6-3 | TRBV6-3*01 | | | |
| TRBV6-4 | TRBV6-4*01 | | | |
| | TRBV6-4*02 | | | |
| TRBV6-5 | TRBV6-5*01 | IMMU 222 (TRBV6-5, | Serotec V BETA 13.1 | Mouse IgG2b |
| | | TRBV6-6 and TRBV6-9) | Coulter Vbeta13.1 | |
| | | BAM13 (TRBV6-1, | Pierce Endogen V beta 13 | Mouse IgG1 |
| | | TRBV6-5) | BD Biosciences Vbeta13.1, | |
| | | | 13.3 | |
| TRBV6-6 | TRBV6-6*01 | JU-74 (TRBV6-6) | Serotec Vbeta13.6 | Mouse IgG1 |
| | TRBV6-6*02 | JU74.3 (TRBV6-6) | Coulter Vbeta13.6 | |
| | TRBV6-6*03 | | | |
| | TRBV6-6*04 | IMMU 222 (TRBV6-5, | Serotec V BETA 13.1 | Mouse IgG2b |
| | TRBV6-6*05 | TRBV6-6 and TRBV6-9) | Coulter Vbeta13.1 | |
| TRBV6-8 | TRBV6-8*01 | | | |
| TRBV6-9 | TRBV6-9*01 | IMMU 222 (TRBV6-5, | Serotec V BETA 13.1 | Mouse IgG2b |
| | | TRBV6-6 and TRBV6-9) | Coulter Vbeta13.1 | |
| TRBV7-2 | TRBV7-2*01 | OT145 (TRBV7-2) | Pierce Endogen V beta 6.7 | Mouse IgG1 |
| | TRBV7-2*02 | | BD Biosciences Vbeta6.7 | |
| | TRBV7-2*03 | | | |
| | TRBV7-2*04 | | | |
| TRBV7-3 | TRBV7-3*01 | | | |
| | TRBV7-3*04 | | | |
| | TRBV7-3*05 | | | |
| TRBV7-4 | TRBV7-4*01 | | | |
| TRBV7-6 | TRBV7-6*01 | | | |
| | TRBV7-6*02 | | | |
| TRBV7-7 | TRBV7-7*01 | | | |
| | TRBV7-7*02 | | | |
| TRBV7-8 | TRBV7-8*01 | | | |
| | TRBV7-8*02 | | | |
| | TRBV7-8*03 | | | |
| TRBV7-9 | TRBV7-9*01 | | | |
| | TRBV7-9*02 | | | |
| | TRBV7-9*03 | | | |
| | TRVB7-9*04 | | | |
| | TRBV7-9*05 | | | |
| | TRBV7-9*06 | | | |
| | TRBV7-9*07 | | | |
| TRBV9 | TRBV9*01 | BL37.2 (TRBV9) | Serotec Vbeta1 | Rat IgG1 |
| | TRBV9*02 | | Coulter Vbeta1 | |
| | TRBV9*03 | | | |
| TRBV10-1 | TRBV10-1*01 | S511 (TRBV10-1, | Pierce Endogen V beta 12 | Mouse IgG2b |
| | TRBV10-1*02 | TRBV10-2, TRBV10-3) | BD Biosciences Vbeta12 | |
| TRBV10-2 | TRBV10-2*01 | | | |
| | TRBV10-2*02 | | | |
| TRBV10-3 | TRBV10-3*01 | VER2.32.1 (TRBV10-3) | Serotec Vbeta12 | Mouse IgG2a |
| | TRBV10-3*02 | S511 (TRBV10-1, | Coulter Vbeta12 | |
| | TRBV10-3*03 | TRBV10-2, TRBV10-3) | Pierce Endogen V beta 12 | Mouse IgG2b |
| | TRBV10-3*04 | | BD Biosciences Vbeta12 | |
| TRBV11-1 | TRBV11-1*01 | | | |
| TRBV11-2 | TRBV11-2*01 | IG125 (TRBV11-2) | Serotec Vbeta21.3 | Mouse IgG2a |
| | TRBV11-2*02 | | Coulter Vbeta21.3 | |
| | TRBV11-2*03 | | | |
| TRBV11-3 | TRBV11-3*01 | | | |
| | TRBV11-3*02 | | | |
| | TRBV11-3*03 | | | |
| | TRBV11-3*04 | | | |
| TRBV12-3 | TRBV12-3*01 | 56C5 (TRBV12-3, | Serotec Vbeta8.1/8.2 | Mouse IgG2a |
| | | TRBV12-4) | Coulter Vbeta8 | |
| | | 56C5.2 (TRBV12-3, | | |
| TRBV12-4 | TRBV12-4*01 | TRBV12-4) | Pierce Endogen V beta 8(a) | Mouse IgG2b |
| | | 16G8 (TRBV12-3, | BD Biosciences Vbeta8 | |
| | | TRBV12-4) | | |
| | TRBV12-4*02 | MX-6 (TRBV12-3, | Pierce Endogen V beta 8(b) | Mouse IgG2a |
| | | TRBV12-4) | BD Biosciences | Mouse IgG2b |
| | | JR2 (TRBV12-3, TRBV12- | Vbeta8 | |
| | | 4, TRBV12-5) | | |
| TRBV12-5 | TRBV12-5*01 | JR2 (TRBV12-3, TRBV12- | BD Biosciences Vbeta8 | Mouse IgG2b |
| | | 4, TRBV12-5) | | |
| TRBV13 | TRBV13*01 | AF-23 (TRBV13) | Serotec Vbeta23 | Mouse IgG1 |
| | TRBV13*02 | AF23 (TRBV13) | Coulter Vbeta23 | |
| | | AHUT7 (Vbeta23) | BD Biosciences Vbeta23 | |
| TRBV14 | TRBV14*01 | TAMAYA1.2 (TRBV14) | Serotec Vbeta16 | Mouse IgG1 |
| | TRBV14*02 | | Coulter Vbeta16 | |
| TRBV15 | TRBV15*01 | | | |
| | TRBV15*02 | | | |
| | TRBV15*03 | | | |
| TRBV16 | TRBV16*01 | | | |
| | TRBV16*03 | | | |
| TRBV18 | TRBV18*01 | BA62 (TRBV18) | Serotec V BETA 18 | Mouse IgG1 |
| | | BA62.6 (TRBV18) | Coulter Vbeta18 | |
| TRBV19 | TRBV19*01 | C1 (TRBV19) | Pierce Endogen V beta 17 | Mouse IgG1 |
| | | E17.5F3 (TRBV19) | BD Biosciences Vbeta17 | |
| | TRBV19*02 | E17.5F3.15.13 (TRBV19) | Serotec Vbeta17 | Mouse IgG1 |
| | TRBV19*03 | | Coulter Vbeta17 | |
| TRBV20-1 | TRBV20-1*01 | MPB2D5 (TRBV20-1) | Serotec VBETA2 | Mouse IgG1 |
| | TRBV20-1*02 | | Coulter Vbeta2 | |
| | TRBV20-1*03 | | | |
| | TRBV20-1*04 | | | |
| | TRBV20-1*05 | | | |
| | TRBV20-1*06 | | | |
| | TRBV20-1*07 | | | |
| TRBV24-1 | TRBV24-1*01 | | | |
| TRBV25-1 | TRBV25-1*01 | C21 (TRBV25-1) | Serotec V BETA 11 | Mouse IgG2a |
| | | | Coulter Vbeta11 | |
| TRBV27 | TRBV27*01 | CAS1.1.3 (TRBV27) | Serotec Vbeta14 | Mouse IgG1 |
| | | | Coulter Vbeta14 | |
| TRBV28 | TRBV28*01 | CH92 (TRBV28) | Serotec Vbeta3 | Mouse IgM |
| | | | Coulter Vbeta3 | |
| | | 8F10 (TRBV28) | Pierce Endogen V beta 3.1 | Mouse IgG1 |
| | | JOVI-3 (TRBV28) | BD Biosciences Vbeta3 | Mouse IgG2a |
| TRBV29-1 | TRBV29-1*01 | WJF24 | Coulter Vbeta4 | Rat IgM |
| | TRBV29-1*02 | | | |
| | TRBV29-1*03 | | | |
| TRBV30 | TRBV30*01 | ELL1.4 (TRBV30) | Serotec Vbeta20 | Mouse IgG1 |
| | TRBV30*02 | | Coulter Vbeta20 | |
| | TRBV30*04 | | | |
| | TRBV30*05 | | | |

TABLE 10B
Amino acid sequences for anti TCRβ V5 antibodies. Amino acid and nucleotide sequences
for murine and humanized antibody molecules which bind to TCRVB 5 (e.g., TCRVB 5-5 or TCRVB
5-6). The amino acid the heavy and light chain CDRs, and the amino acid and nucleotide
sequences of the heavy and light chain variable regions, and the heavy and light chains
are shown.
Murine antibody C, also referred to as 4H11

| | | |
|---|---|---|
| SEQ ID NO: 1315 | HC CDR1 (Kabat) | AYGVN |
| SEQ ID NO: 1316 | HC CDR2 (Kabat) | MIWGDGNTDYNSALKS |
| SEQ ID NO: 1317 | HC CDR3 (Kabat) | DRVTATLYAMDY |
| SEQ ID NO: 1318 | HC CDR1 (Chothia) | GFSLTAY |
| SEQ ID NO: 1319 | HC CDR2 (Chothia) | WGDGN |
| SEQ ID NO: 1317 | HC CDR3 (Chothia) | DRVTATLYAMDY |
| SEQ ID NO: 1320 | HC CDR1 (Combined) | GFSLTAYGVN |
| SEQ ID NO: 1316 | HC CDR2 (Combined) | MIWGDGNTDYNSALKS |
| SEQ ID NO: 1317 | HC CDR3 (Combined) | DRVTATLYAMDY |
| SEQ ID NO: 1321 | LC CDR1 (Kabat) | SASQGISNYLN |
| SEQ ID NO: 1322 | LC CDR2 (Kabat) | YTSSLHS |
| SEQ ID NO: 1323 | LC CDR3 (Kabat) | QQYSKLPRT |
| SEQ ID NO: 1321 | LC CDR1 (Chothia) | SASQGISNYLN |
| SEQ ID NO: 1322 | LC CDR2 (Chothia) | YTSSLHS |
| SEQ ID NO: 1323 | LC CDR3 (Chothia) | QQYSKLPRT |
| SEQ ID NO: 1321 | LC CDR1 (Combined) | SASQGISNYLN |
| SEQ ID NO: 1322 | LC CDR2 (Combined) | YTSSLHS |
| SEQ ID NO: 1323 | LC CDR3 (Combined) | QQYSKLPRT |
| SEQ ID NO: 232 | VH | DIQMTQTTSSLSASLGDRVTISCSASQGISNYLNWYQQK |
| | | PDGTVKLLIYYTSSLHSGVPSRFSGSGSGTDYSLTISNLE |
| | | PEDIATYYCQQYSKLPRTFGGGTKVEIK |
| SEQ ID NO: 233 | VL | QVQLKESGPGLVAPSQSLSITCTVSGFSLTAYGVNWVR |
| | | QPPGKGLEWLGMIWGDGNTDYNSALKSRLSISKDNSKS |
| | | QVFLKMNSLQTDDTARYYCARDRVTATLYAMDYWGQ |
| | | GTSVTVSS |

Humanized antibody C C-H-1 antibody

| | | |
|---|---|---|
| SEQ ID NO: 1315 | HC CDR1 (Kabat) | AYGVN |
| SEQ ID NO: 1316 | HC CDR2 (Kabat) | MIWGDGNTDYNSALKS |
| SEQ ID NO: 1317 | HC CDR3 (Kabat) | DRVTATLYAMDY |
| SEQ ID NO: 1318 | HC CDR1 (Chothia) | GFSLTAY |
| SEQ ID NO: 1319 | HC CDR2 (Chothia) | WGDGN |
| SEQ ID NO: 1317 | HC CDR3 (Chothia) | DRVTATLYAMDY |
| SEQ ID NO: 1320 | HC CDR1 (Combined) | GFSLTAYGVN |
| SEQ ID NO: 1316 | HC CDR2 (Combined) | MIWGDGNTDYNSALKS |
| SEQ ID NO: 1317 | HC CDR3 (Combined) | DRVTATLYAMDY |
| SEQ ID NO: 1321 | LC CDR1 (Kabat) | SASQGISNYLN |
| SEQ ID NO: 1322 | LC CDR2 (Kabat) | YTSSLHS |
| SEQ ID NO: 1323 | LC CDR3 (Kabat) | QQYSKLPRT |
| SEQ ID NO: 1321 | LC CDR1 (Chothia) | SASQGISNYLN |
| SEQ ID NO: 1322 | LC CDR2 (Chothia) | YTSSLHS |
| SEQ ID NO: 1323 | LC CDR3 (Chothia) | QQYSKLPRT |
| SEQ ID NO: 1321 | LC CDR1 (Combined) | SASQGISNYLN |
| SEQ ID NO: 1322 | LC CDR2 (Combined) | YTSSLHS |
| SEQ ID NO: 1323 | LC CDR3 (Combined) | QQYSKLPRT |
| SEQ ID NO: 1324 | VL | DIQMTQSPSSLSASVGDRVTITCSASQGISNYLNWYQQTP |
| | | GKAPKLLIYYTSSLHSGVPSRFSGSGSGTDYTFTISSLQPE |
| | | DIATYYCQQYSKLPRTFGQGTKLQIT |
| SEQ ID NO: 1325 | VH | QVQLQESGPGLVRPSQTLSLTCTVSGFSLTAYGVNWVR |
| | | QPPGRGLEWLGMIWGDGNTDYNSALKSRVTMLKDTSK |
| | | NQFSLRLSSVTAADTAVYYCARDRVTATLYAMDYW |
| | | GQGSLVTVSS |

Humanized antibody C Variable light chain (VL)

| | | | |
|---|---|---|---|
| SEQ ID NO: 3000 | VL | C-H-VL.1 | DIQMTQSPSFLSASVGDRVTITCSASQGISNYLNWYQQK |
| | | | PGKAVKLLIYYTSSLHSGVPSRFSGSGSGTEYTLTISSLQ |
| | | | PEDFATYYCQQYSKLPRTFGGGTKVEIK |
| SEQ ID NO: 3001 | VL | C-H-VL.2 | DIQMTQSPSSLSASVGDRVTITCSASQGISNYLNWYQQK |
| | | | PGKAVKLLIYYTSSLHSGVPSRFSGSGSGTDYTLTISSLQ |
| | | | PEDFATYYCQQYSKLPRTFGGGTKVEIK |
| SEQ ID NO: 3002 | VL | C-H-VL.3 | DIQMTQSPSSLSASVGDRVTITCSASQGISNYLNWYQQK |
| | | | PGKVVKLLIYYTSSLHSGVPSRFSGSGSGTDYTLTISSLQ |
| | | | PEDVATYYCQQYSKLPRTFGGGTKVEIK |
| SEQ ID NO: 3003 | VL | C-H-VL.4 | DIQMTQSPSSLSASVGDRVTITCSASQGISNYLNWYQQK |
| | | | PGQAVKLLIYYTSSLHSGVPSRFSGSGSGTDYTLTISSLQ |
| | | | PEDVATYYCQQYSKLPRTFGGGTKVEIK |
| SEQ ID NO: 3004 | VL | C-H-VL.5 | DIQMTQSPSSLSASVGDRVTITCSASQGISNYLNWYQQK |
| | | | PGKAVKLLIYYTSSLHSGVPSRFSGSGSGTDYTFTISSLQ |
| | | | PEDIATYYCQQYSKLPRTFGGGTKVEIK |
| SEQ ID NO: 3005 | VL | C-H-VL.6 | DIQMTQSPSSLSASVGDRVTITCSASQGISNYLNWYQQK |
| | | | PGKTVKLLIYYTSSLHSGIPSRFSGSGSGTDYTLTIRSLQP |
| | | | EDFATYYCQQYSKLPRTFGGGTKVEIK |
| SEQ ID NO: 3006 | VL | C-H-VL.7 | AIQMTQSPSSLSASVGDRVTITCSASQGISNYLNWYQQK |
| | | | PGKAVKLLIYYTSSLHSGVPSRFSGSGSGTDYTLTISSLQ |
| | | | PEDFATYYCQQYSKLPRTFGGGTKVEIK |
| SEQ ID NO: 3007 | VL | C-H-VL.8 | DIQMTQSPSSVSASVGDRVTITCSASQGISNYLNWYQQK |
| | | | PGKAVKLLIYYTSSLHSGVPSRFSGSGSGTDYTLTISSLQ |
| | | | PEDFATYYCQQYSKLPRTFGGGTKVEIK |
| SEQ ID NO: 3008 | VL | C-H-VL.9 | DIQMTQSPSSLSASVGDRVTITCSASQGISNYLNWYQQK |
| | | | PGKAVKRLIYYTSSLHSGVPSRFSGSGSGTEYTLTISNLQ |
| | | | PEDFATYYCQQYSKLPRTFGGGTKVEIK |
| SEQ ID NO: 3009 | VL | C-H-VL.10 | AIRMTQSPFSLSASVGDRVTITCSASQGISNYLNWYQQK |
| | | | PAKAVKLFIYYTSSLHSGVPSRFSGSGSGTDYTLTISSLQ |
| | | | PEDFATYYCQQYSKLPRTFGGGTKVEIK |
| SEQ ID NO: 3010 | VL | C-H-VL.11 | DIQMTQSPSSLSASVGDRVTITCSASQGISNYLNWYQQK |
| | | | PGKAVKRLIYYTSSLHSGVPSRFSGSGSGTEYTLTISSLQ |
| | | | PEDFATYYCQQYSKLPRTFGGGTKVEIK |
| SEQ ID NO: 3011 | VL | C-H-VL.12 | DIQMTQSPSTLSASVGDRVTITCSASQGISNYLNWYQQK |
| | | | PGKAVKLLIYYTSSLHSGVPSRFSGSGSGTEYTLTISSLQ |
| | | | PDDFATYYCQQYSKLPRTFGGGTKVEIK |
| SEQ ID NO: 3012 | VL | C-H-VL.13 | DIQMTQSPSSLSASVGDRVTITCSASQGISNYLNWYQQK |
| | | | PGKAVKSLIYYTSSLHSGVPSRFSGSGSGTDYTLTISSLQ |
| | | | PEDFATYYCQQYSKLPRTFGGGTKVEIK |
| SEQ ID NO: 3013 | VL | C-H-VL.14 | DIQMTQSPSSLSASVGDRVTITCSASQGISNYLNWYQQK |
| | | | PGKAVKSLIYYTSSLHSGVPSKFSGSGSGTDYTLTISSLQ |
| | | | PEDFATYYCQQYSKLPRTFGGGTKVEIK |
| SEQ ID NO: 3014 | VL | C-H-VL.15 | DIQMTQSPSSLSASVGDRVTITCSASQGISNYLNWYQQK |
| | | | PEKAVKSLIYYTSSLHSGVPSRFSGSGSGTDYTLTISSLQ |
| | | | PEDFATYYCQQYSKLPRTFGGGTKVEIK |
| SEQ ID NO: 3015 | VL | C-H-VL.16 | DIQMTQSPSAMSASVGDRVTITCSASQGISNYLNWYQQ |
| | | | KPGKVVKRLIYYTSSLHSGVPSRFSGSGSGTEYTLTISSL |
| | | | QPEDFATYYCQQYSKLPRTFGGGTKVEIK |
| SEQ ID NO: 3016 | VL | C-H-VL.17 | DIVMTQSPDSLAVSLGERATINCSASQGISNYLNWYQQ |
| | | | KPGQPVKLLIYYTSSLHSGVPDRFSGSGSGTDYTLTISSL |
| | | | QAEDVAVYYCQQYSKLPRTFGGGTKVEIK |
| SEQ ID NO: 3017 | VL | C-H-VL.18 | EIVMTQSPGTLSLSPGERATLSCSASQGISNYLNWYQQK |
| | | | PGQAVKLLIYYTSSLHSGIPDRFSGSGSGTDYTLTISRLEP |
| | | | EDFAVYYCQQYSKLPRTFGGGTKVEIK |
| SEQ ID NO: 3018 | VL | C-H-VL.19 | EIVMTQSPPTLSLSPGERVTLSCSASQGISNYLNWYQQK |
| | | | PGQAVKLLIYYTSSLHSGIPARFSGSGSGTDYTLTISSLQP |
| | | | EDFAVYYCQQYSKLPRTFGGGTKVEIK |
| SEQ ID NO: 3019 | VL | C-H-VL.20 | EIVMTQSPPTLSLSPGERVTLSCSASQGISNYLNWYQQK |
| | | | PGQAVKLLIYYTSSLHSSIPARFSGSGSGTDYTLTISSLQP |
| | | | EDFAVYYCQQYSKLPRTFGGGTKVEIK |
| SEQ ID NO: 3020 | VL | C-H-VL.21 | EIVMTQSPATLSLSPGERATLSCSASQGISNYLNWYQQK |
| | | | PGQAVKLLIYYTSSLHSGIPARFSGSGSGTDYTLTISSLEP |
| | | | EDFAVYYCQQYSKLPRTFGGGTKVEIK |
| SEQ ID NO: 3021 | VL | C-H-VL.22 | EIVMTQSPATLSLSPGERATLSCSASQGISNYLNWYQQK |
| | | | PGQAVKLLIYYTSSLHSGIPARFSGSGSGTDYTLTISRLEP |
| | | | EDFAVYYCQQYSKLPRTFGGGTKVEIK |
| SEQ ID NO: 3022 | VL | C-H-VL.23 | EIVMTQSPATLSLSPGERATLSCSASQGISNYLNWYQQK |
| | | | PGQAVKLLIYYTSSLHSGIPDRFSGSGSGTDYTLTISRLEP |
| | | | EDFAVYYCQQYSKLPRTFGGGTKVEIK |
| SEQ ID NO: 3023 | VL | C-H-VL.24 | EIVMTQSPATLSLSPGERATLSCSASQGISNYLNWYQQK |
| | | | PGLAVKLLIYYTSSLHSGIPDRFSGSGSGTDYTLTISRLEP |
| | | | EDFAVYYCQQYSKLPRTFGGGTKVEIK |
| SEQ ID NO: 3024 | VL | C-H-VL.25 | DIQMIQSPSFLSASVGDRVSIICSASQGISNYLNWYLQKP |
| | | | GKSVKLFIYYTSSLHSGVSSRFSGRGSGTDYTLTIISLKPE |
| | | | DFAAYYCQQYSKLPRTFGGGTKVEIK |
| SEQ ID NO: 3025 | VL | C-H-VL.26 | EIVMTQSPATLSLSPGERATLSCSASQGISNYLNWYQQK |
| | | | PGQAVKLLIYYTSSLHSGIPARFSGSGSGTDYTLTISSLQP |
| | | | EDFAVYYCQQYSKLPRTFGGGTKVEIK |
| SEQ ID NO: 3026 | VL | C-H-VL.27 | EIVMTQSPATLSLSPGERATLSCSASQGISNYLNWYQQK |
| | | | PGQAVKLLIYYTSSLHSGIPARFSGSGPGTDYTLTISSLEP |
| | | | EDFAVYYCQQYSKLPRTFGGGTKVEIK |
| SEQ ID NO: 3027 | VL | C-H-VL.28 | DIVMTQTPLSLSVTPGQPASISCSASQGISNYLNWYLQK |
| | | | PGQSVKLLIYYTSSLHSGVPDRFSGSGSGTDYTLKISRVE |
| | | | AEDVGVYYCQQYSKLPRTFGGGTKVEIK |
| SEQ ID NO: 3028 | VL | C-H-VL.29 | DIVMTQTPLSLSVTPGQPASISCSASQGISNYLNWYLQK |
| | | | PGQPVKLLIYYTSSLHSGVPDRFSGSGSGTDYTLKISRVE |
| | | | AEDVGVYYCQQYSKLPRTFGGGTKVEIK |
| SEQ ID NO: 3029 | VL | C-H-VL.30 | DIVMTQSPAFLSVTPGEKVTITCSASQGISNYLNWYQQK |
| | | | PDQAVKLLIYYTSSLHSGVPSRFSGSGSGTDYTFTISSLE |
| | | | AEDAATYYCQQYSKLPRTFGGGTKVEIK |
| SEQ ID NO: 3030 | VL | C-H-VL.31 | DIVMTQSPLSLPVTPGEPASISCSASQGISNYLNWYLQKP |
| | | | GQSVKLLIYYTSSLHSGVPDRFSGSGSGTDYTLKISRVE |
| | | | AEDVGVYYCQQYSKLPRTFGGGTKVEIK |
| SEQ ID NO: 3031 | VL | C-H-VL.32 | DIVMTQTPLSLPVTPGEPASISCSASQGISNYLNWYLQKP |
| | | | GQSVKLLIYYTSSLHSGVPDRFSGSGSGTDYTLKISRVE |
| | | | AEDVGVYYCQQYSKLPRTFGGGTKVEIK |
| SEQ ID NO: 3032 | VL | C-H-VL.33 | EIVMTQSPATLSVSPGERATLSCSASQGISNYLNWYQQK |
| | | | PGQAVKLLIYYTSSLHSGIPARFSGSGSGTEYTLTISILQS |
| | | | EDFAVYYCQQYSKLPRTFGGGTKVEIK |
| SEQ ID NO: 3033 | VL | C-H-VL.34 | EIVMTQSPATLSVSPGERATLSCSASQGISNYLNWYQQK |
| | | | PGQAVKLLIYYTSSLHSGIPARFSGSGSGTEYTLTISSLQS |
| | | | EDFAVYYCQQYSKLPRTFGGGTKVEIK |
| SEQ ID NO: 3034 | VL | C-H-VL.35 | DIVMTQSPLSLPVTLGQPASISCSASQGISNYLNWYQQR |
| | | | PGQSVKRLIYYTSSLHSGVPDRFSGSGSGTDYTLKISRVE |
| | | | AEDVGVYYCQQYSKLPRTFGGGTKVEIK |
| SEQ ID NO: 3035 | VL | C-H-VL.36 | EITMTQSPAFMSATPGDKVNISCSASQGISNYLNWYQQ |
| | | | KPGEAVKFIIYYTSSLHSGIPPRFSGSGYGTDYTLTINNIE |
| | | | SEDAAYYYCQQYSKLPRTFGGGTKVEIK |
| SEQ ID NO: 3036 | VL | C-H-VL.37 | DIVMTQTPLSSPVTLGQPASISCSASQGISNYLNWYQQR |
| | | | PGQPVKLLIYYTSSLHSGVPDRFSGSGAGTDYTLKISRV |
| | | | EAEDVGVYYCQQYSKLPRTFGGGTKVEIK |
| SEQ ID NO: 3037 | VL | C-H-VL.38 | EIVMTQSPDFQSVTPKEKVTITCSASQGISNYLNWYQQK |
| | | | PDQSVKLLIYYTSSLHSGVPSRFSGSGSGTDYTLTINSLE |
| | | | AEDAATYYCQQYSKLPRTFGGGTKVEIK |
| SEQ ID NO: 3038 | VL | C-H-VL.39 | EIVMTQTPLSLSITPGEQASISCSASQGISNYLNWYLQKA |
| | | | RPVVKLLIYYTSSLHSGVPDRFSGSGSGTDYTLKISRVEA |
| | | | EDFGVYYCQQYSKLPRTFGGGTKVEIK |
| SEQ ID NO: 3039 | VL | C-H-VL.40 | EIVMTQTPLSLSITPGEQASMSCSASQGISNYLNWYLQK |
| | | | ARPVVKLLIYYTSSLHSGVPDRFSGSGSGTDYTLKISRVE |
| | | | AEDFGVYYCQQYSKLPRTFGGGTKVEIK |

Humanized antibody C Variable HEAVY chain (VH)

| | | | |
|---|---|---|---|
| SEQ ID NO: 3040 | VH | C-H-VH.1 | QVTLKESGPVLVKPTETLTLTCTVSGFSLTAYGVNWVR |
| | | | QPPGKALEWLGMIWGDGNTDYNSALKSRLTISKDNSKS |
| | | | QVVLTMTNMDPVDTATYYCARDRVTATLYAMDYWG |
| | | | QGTLVTVSS |
| SEQ ID NO: 3041 | VH | C-H-VH.2 | QVTLKESGPALVKPTETLTLTCTVSGFSLTAYGVNWVR |
| | | | QPPGKALEWLGMIWGDGNTDYNSALKSRLIISKDNSKS |
| | | | QVVLTMTNMDPVDTATYYCARDRVTATLYAMDYWG |
| | | | QGTLVTVSS |
| SEQ ID NO: 3042 | VH | C-H-VH.3 | QVTLKESGPALVKPTQTLTLTCTVSGFSLTAYGVNWVR |
| | | | QPPGKALEWLGMIWGDGNTDYNSALKSRLTISKDNSKS |
| | | | QVVLTMTNMDPVDTATYYCARDRVTATLYAMDYWG |
| | | | QGTLVTVSS |
| SEQ ID NO: 3043 | VH | C-H-VH.4 | QVQLQESGPGLVKPSGTLSLTCAVSGFSLTAYGVNWVR |
| | | | QPPGKGLEWLGMIWGDGNTDYNSALKSRLTISKDNSKS |
| | | | QVSLKLSSVTAADTAVYYCARDRVTATLYAMDYWGQ |
| | | | GTLVTVSS |
| SEQ ID NO: 3044 | VH | C-H-VH.5 | QVTLKESGPTLVKPTQTLTLTCTVSGFSLTAYGVNWVR |
| | | | QPPGKALEWLGMIWGDGNTDYNSALKSRLTITKDNSKS |
| | | | QVVLTMTNMDPVDTATYYCARDRVTATLYAMDYWG |
| | | | QGTLVTVSS |
| SEQ ID NO: 3045 | VH | C-H-VH.6 | QVTLKESGPALVKPTQTLTLTCTVSGFSLTAYGVNWVR |
| | | | QPPGKALEWLGMIWGDGNTDYNSALKSRLTITKDNSKS |
| | | | QVVLTMTNMDPVDTATYYCARDRVTATLYAMDYWG |
| | | | QGTLVTVSS |
| SEQ ID NO: 3046 | VH | C-H-VH.7 | QVQLQESGPGLVKPSQTLSLTCTVSGFSLTAYGVNWVR |
| | | | QPPGKGLEWLGMIWGDGNTDYNSALKSRLTISKDNSKS |
| | | | QVSLKLSSVTAADTAVYYCARDRVTATLYAMDYWGQ |
| | | | GTLVTVSS |
| SEQ ID NO: 3047 | VH | C-H-VH.8 | QVQLQESGPGLVKPSETLSLTCTVSGFSLTAYGVNWVR |
| | | | QPPGKGLEWLGMIWGDGNTDYNSALKSRLTISKDNSKS |
| | | | QVSLKLSSVTAADTAVYYCARDRVTATLYAMDYWGQ |
| | | | GTLVTVSS |
| SEQ ID NO: 3048 | VH | C-H-VH.9 | QVQLQESGPGLVKPSQTLSLTCAVSGFSLTAYGVNWVR |
| | | | QPPGKGLEWLGMIWGDGNTDYNSALKSRLTISKDNSKS |
| | | | QVSLKLSSVTAADTAVYYCARDRVTATLYAMDYWGQ |
| | | | GTLVTVSS |
| SEQ ID NO: 3049 | VH | C-H-VH.10 | QVQLQESGPGLVKPSDTLSLTCTVSGFSLTAYGVNWVR |
| | | | QPPGKGLEWLGMIWGDGNTDYNSALKSRLTISKDNSKS |
| | | | QVSLKLSSVTAADTAVYYCARDRVTATLYAMDYWGQ |
| | | | GTLVTVSS |
| SEQ ID NO: 3050 | VH | C-H-VH.11 | QVQLQESGPGLVKPSQTLSLTCTVSGFSLTAYGVNWVR |
| | | | QHPGKGLEWLGMIWGDGNTDYNSALKSRLTISKDNSKS |
| | | | QVSLKLSSVTAADTAVYYCARDRVTATLYAMDYWGQ |
| | | | GTLVTVSS |
| SEQ ID NO: 3051 | VH | C-H-VH.12 | QVQLQESGPGLVKPSQTLSLTCTVSGFSLTAYGVNWVR |
| | | | QPAGKGLEWLGMIWGDGNTDYNSALKSRLTISKDNSKS |
| | | | QVSLKLSSVTAADTAVYYCARDRVTATLYAMDYWGQ |
| | | | GTLVTVSS |
| SEQ ID NO: 3052 | VH | C-H-VH.13 | QVQLQESGPGLVKPSQTLSLTCAVSGFSLTAYGVNWVR |
| | | | QPPGKGLEWLGMIWGDGNTDYNSALKSRLTISKDNSKS |
| | | | QVSLKLSSVTAVDTAVYYCARDRVTATLYAMDYWGQ |
| | | | GTLVTVSS |
| SEQ ID NO: 3053 | VH | C-H-VH.14 | QVQLQESGPGLVKPSETLSLTCTVSGFSLTAYGVNWVR |
| | | | QPPGKGLEWLGMIWGDGNTDYNSALKSRLTISKDNSKS |
| | | | HVSLKLSSVTAADTAVYYCARDRVTATLYAMDYWGQ |
| | | | GTLVTVSS |
| SEQ ID NO: 3054 | VH | C-H-VH.15 | QVQLQESGPGLVKPSETLSLTCAVSGFSLTAYGVNWVR |
| | | | QPPGKGLEWLGMIWGDGNTDYNSALKSRLTISKDNSKS |
| | | | QVSLKLSSVTAADTAVYYCARDRVTATLYAMDYWGQ |
| | | | GTLVTVSS |
| SEQ ID NO: 3055 | VH | C-H-VH.16 | QVQLQESGPGLVKPSQTLSLTCAVYGFSLTAYGVNWVR |
| | | | QPPGKGLEWLGMIWGDGNTDYNSALKSRLTISKDNSKS |
| | | | QVSLKLSSVTAADTAVYYCARDRVTATLYAMDYWGQ |
| | | | GTLVTVSS |
| SEQ ID NO: 3056 | VH | C-H-VH.17 | RVQLQESGPGLVKPSETLSLTCTVSGFSLTAYGVNWVR |
| | | | QPPGKGLEWLGMIWGDGNTDYNSALKSRLTISKDNSKS |
| | | | QVPLKLSSVTAADTAVYYCARDRVTATLYAMDYWGQ |
| | | | GTLVTVSS |
| SEQ ID NO: 3057 | VH | C-H-VH.18 | QVQLQESGPGLVKPSQTLSLTCTVSGFSLTAYGVNWVR |
| | | | QHPGKGLEWLGMIWGDGNTDYNSALKSLLTISKDNSKS |
| | | | QVSLKLSSVTAADTAVYYCARDRVTATLYAMDYWGQ |
| | | | GTLVTVSS |
| SEQ ID NO: 3058 | VH | C-H-VH.19 | QVQLQESGPGLVKPSDTLSLTCAVSGFSLTAYGVNWVR |
| | | | QPPGKGLEWLGMIWGDGNTDYNSALKSRLTISKDNSKS |
| | | | QVSLKLSSVTALDTAVYYCARDRVTATLYAMDYWGQ |
| | | | GTLVTVSS |
| SEQ ID NO: 3059 | VH | C-H-VH.20 | QVQLQESGPGLVKPSDTLSLTCAVSGFSLTAYGVNWVR |
| | | | QPPGKGLEWLGMIWGDGNTDYNSALKSRLTISKDNSKS |
| | | | QVSLKLSSVTAVDTAVYYCARDRVTATLYAMDYWGQ |
| | | | GTLVTVSS |
| SEQ ID NO: 3060 | VH | C-H-VH.21 | QVQLQESGSGLVKPSQTLSLTCAVSGFSLTAYGVNWVR |
| | | | QPPGKGLEWLGMIWGDGNTDYNSALKSRLTISKDNSKS |
| | | | QVSLKLSSVTAADTAVYYCARDRVTATLYAMDYWGQ |
| | | | GTLVTVSS |
| SEQ ID NO: 3061 | VH | C-H-VH.22 | EVQLVESGGGLVQPGRSLRLSCTVSGFSLTAYGVNWVR |
| | | | QAPGKGLEWLGMIWGDGNTDYNSALKSRLTISKDNSKS |
| | | | IVYLQMNSLKTEDTAVYYCARDRVTATLYAMDYWGQ |
| | | | GTLVTVSS |
| SEQ ID NO: 3062 | VH | C-H-VH.23 | EVQLVESGGGLVQPGPSLRLSCTVSGFSLTAYGVNWVR |
| | | | QAPGKGLEWLGMIWGDGNTDYNSALKSRLTISKDNSKS |
| | | | IVYLQMNSLKTEDTAVYYCARDRVTATLYAMDYWGQ |
| | | | GTLVTVSS |
| SEQ ID NO: 3063 | VH | C-H-VH.24 | QVQLQESGSGLVKPSQTLSLTCAVSGFSLTAYGVNWVR |
| | | | QSPGKGLEWLGMIWGDGNTDYNSALKSRLTISKDNSKS |
| | | | QVSLKLSSVTAADTAVYYCARDRVTATLYAMDYWGQ |
| | | | GTLVTVSS |
| SEQ ID NO: 3064 | VH | C-H-VH.25 | QVQLQESGPGLVKPSETLSLTCTVSGFSLTAYGVNWVR |
| | | | QPAGKGLEWLGMIWGDGNTDYNSALKSRLTISKDNSKS |
| | | | QVSLKLSSVTAADTAVYYCARDRVTATLYAMDYWGQ |
| | | | GTLVTVSS |
| SEQ ID NO: 3065 | VH | C-H-VH.26 | EVQLVESGGGLVKPGRSLRLSCTVSGFSLTAYGVNWVR |
| | | | QAPGKGLEWLGMIWGDGNTDYNSALKSRLTISKDNSKS |
| | | | IVYLQMNSLKTEDTAVYYCARDRVTATLYAMDYWGQ |
| | | | GTLVTVSS |
| SEQ ID NO: 3066 | VH | C-H-VH.27 | QVQLQESGPGLVKPSETLSLTCAVYGFSLTAYGVNWVR |
| | | | QPPGKGLEWLGMIWGDGNTDYNSALKSRLTISKDNSKS |
| | | | QVYLKLSSVTAADTAVYYCARDRVTATLYAMDYWGQ |
| | | | GTLVTVSS |
| SEQ ID NO: 3067 | VH | C-H-VH.28 | QVQLQESGPGLVKPSDTLSLTCAVSGFSLTAYGVNWVR |
| | | | QPPGKGLEWLGMIWGDGNTDYNSALKSRLTISKDNSKS |
| | | | QVSLKLSSVTAVDTGVYYCARDRVTATLYAMDYWGQ |
| | | | GTLVTVSS |
| SEQ ID NO: 3068 | VH | C-H-VH.29 | EVQLVESGGGLVQPGGSLRLSCAVSGFSLTAYGVNWV |
| | | | RQAPGKGLEWLGMIWGDGNTDYNSALKSRLTISKDNS |
| | | | KSSVYLQMNSLKTEDTAVYYCARDRVTATLYAMDYW |
| | | | GQGTLVTVSS |
| SEQ ID NO: 3069 | VH | C-H-VH.30 | EVQLVESGGGLVKPGGSLRLSCAVSGFSLTAYGVNWV |
| | | | RQAPGKGLEWLGMIWGDGNTDYNSALKSRLTISKDNS |
| | | | KSTVYLQMNSLKTEDTAVYYCARDRVTATLYAMDYW |
| | | | GQGTLVTVSS |
| SEQ ID NO: 3070 | VH | C-H-VH.31 | QVQLQQSGPGLVKPSQTLSLTCAVSGFSLTAYGVNWVR |
| | | | QSPSRGLEWLGMIWGDGNTDYNSALKSRLTINKDNSKS |
| | | | QVSLQLNSVTPEDTAVYYCARDRVTATLYAMDYWGQ |
| | | | GTLVTVSS |
| SEQ ID NO: 3071 | VH | C-H-VH.32 | QVQLVESGGGLVQPGGSLRLSCSVSGFSLTAYGVNWVR |
| | | | QAPGKGLEWLGMIWGDGNTDYNSALKSRLTISKDNSKS |
| | | | TVYLQMNSLRAEDTAVYYCARDRVTATLYAMDYWGQ |
| | | | GTLVTVSS |
| SEQ ID NO: 3072 | VH | C-H-VH.33 | QVQLQQWGAGLLKPSETLSLTCAVYGFSLTAYGVNWV |
| | | | RQPPGKGLEWLGMIWGDGNTDYNSALKSRLTISKDNSK |
| | | | SQVSLKLSSVTAADTAVYYCARDRVTATLYAMDYWG |
| | | | QGTLVTVSS |
| SEQ ID NO: 3073 | VH | C-H-VH.34 | QVQLVESGGGVVQPGRSLRLSCAVSGFSLTAYGVNWV |
| | | | RQAPGKGLEWLGMIWGDGNTDYNSALKSRLTISKDNST |
| | | | STVFLQMNSLRAEDTAVYYCARDRVTATLYAMDYWG |
| | | | QGTLVTVSS |
| SEQ ID NO: 3074 | VH | C-H-VH.35 | EVQLVESGGGLVQPGGSLRLSCAVSGFSLTAYGVNWV |
| | | | RQAPGKGLEWLGMIWGDGNTDYNSALKSRLTISKDNS |
| | | | KSTVYLQMNSLRAEDTAVYYCARDRVTATLYAMDYW |
| | | | GQGTLVTVSS |
| SEQ ID NO: 3075 | VH | C-H-VH.36 | EVQLVESGGGLVQPGGSLRLSCAVSGFSLTAYGVNWV |
| | | | RQAPGKGLEWLGMIWGDGNTDYNSALKSRLTISKDNA |
| | | | KSSVYLQMNSLRDEDTAVYYCARDRVTATLYAMDYW |
| | | | GQGTLVTVSS |
| SEQ ID NO: 3076 | VH | C-H-VH.37 | EVQLLESGGGLVQPGGSLRLSCAVSGFSLTAYGVNWVR |
| | | | QAPGKGLEWLGMIWGDGNTDYNSALKSRLTISKDNSKS |
| | | | TVYLQMNSLRAEDTAVYYCARDRVTATLYAMDYWGQ |
| | | | GTLVTVSS |
| SEQ ID NO: 3077 | VH | C-H-VH.38 | QVQLVESGGGLVKPGGSLRLSCAVSGFSLTAYGVNWV |
| | | | RQAPGKGLEWLGMIWGDGNTDYNSALKSRLTISKDNA |
| | | | KSSVYLQMNSLRAEDTAVYYCARDRVTATLYAMDYW |
| | | | GQGTLVTVSS |
| SEQ ID NO: 3078 | VH | C-H-VH.39 | EVQLVESGGGLVQPGGSLKLSCAVSGFSLTAYGVNWV |
| | | | RQASGKGLEWLGMIWGDGNTDYNSALKSRLTISKDNS |
| | | | KSTVYLQMNSLKTEDTAVYYCARDRVTATLYAMDYW |
| | | | GQGTLVTVSS |
| SEQ ID NO: 3079 | VH | C-H-VH.40 | QVQLLESGGGLVKPGGSLRLSCAVSGFSLTAYGVNWV |
| | | | RQAPGKGLEWLGMIWGDGNTDYNSALKSRLTISKDNA |
| | | | KSSVYLQMNSLRAEDTAVYYCARDRVTATLYAMDYW |
| | | | GQGTLVTVSS |
| SEQ ID NO: 3080 | VH | C-H-VH.41 | QVQLVESGGGVVQPGRSLRLSCAVSGFSLTAYGVNWV |
| | | | RQAPGKGLEWLGMIWGDGNTDYNSALKSRLTISKDNS |
| | | | KSTVYLQMNSLRAEDTAVYYCARDRVTATLYAMDYW |
| | | | GQGTLVTVSS |
| SEQ ID NO: 3081 | VH | C-H-VH.42 | QVQLVESGGGVVQPGRSLRLSCAVSGFSLTAYGVNWV |
| | | | RQAPGKGLEWLGMIWGDGNTDYNSALKSRLTISKDNS |
| | | | KSRVYLQMNSLRAEDTAVYYCARDRVTATLYAMDYW |
| | | | GQGTLVTVSS |
| SEQ ID NO: 3082 | VH | C-H-VH.43 | QVQLVESGGGVVQPGRSLRLSCAVSGFSLTAYGVNWV |
| | | | RQAPGKGLEWLGMIWGDGNTDYNSALKSRLAISKDNS |
| | | | KSTVYLQMNSLRAEDTAVYYCARDRVTATLYAMDYW |
| | | | GQGTLVTVSS |
| SEQ ID NO: 3083 | VH | C-H-VH.44 | QVQLVESGGGVVQPGGSLRLSCAVSGFSLTAYGVNWV |
| | | | RQAPGKGLEWLGMIWGDGNTDYNSALKSRLTISKDNS |
| | | | KSTVYLQMNSLRAEDTAVYYCARDRVTATLYAMDYW |
| | | | GQGTLVTVSS |
| SEQ ID NO: 3084 | VH | C-H-VH.45 | EVQLVESGGGLVQPGGSLRLSCAVSGFSLTAYGVNWV |
| | | | RQAPGKGLEWLGMIWGDGNTDYNSALKSRLTISKDNA |
| | | | KSTVYLQMNSLRAEDTAVYYCARDRVTATLYAMDYW |
| | | | GQGTLVTVSS |
| SEQ ID NO: 3085 | VH | C-H-VH.46 | EVQLVESGGGLVQPGGSLRLSCAVSGFSLTAYGVNWV |
| | | | RQAPGKGLEWLGMIWGDGNTDYNSALKSRLTISKDNA |
| | | | KSSVYLQMNSLRAEDTAVYYCARDRVTATLYAMDYW |
| | | | GQGTLVTVSS |
| SEQ ID NO: 3086 | VH | C-H-VH.47 | EVQLVESGGVVVQPGGSLRLSCAVSGFSLTAYGVNWV |
| | | | RQAPGKGLEWLGMIWGDGNTDYNSALKSRLTISKDNS |
| | | | KSSVYLQMNSLRTEDTALYYCARDRVTATLYAMDYW |
| | | | GQGTLVTVSS |
| SEQ ID NO: 3087 | VH | C-H-VH.48 | EVQLVESGGGLVQPGGSLRLSCAVSGFSLTAYGVNWV |
| | | | RQAPGKGLEWLGMIWGDGNTDYNSALKSRLTISKHNS |
| | | | KSTVYLQMNSLRAEDTAVYYCARDRVTATLYAMDYW |
| | | | GQGTLVTVSS |
| SEQ ID NO: 3088 | VH | C-H-VH.49 | EVQLVESGGGLVKPGGSLRLSCAVSGFSLTAYGVNWV |
| | | | RQAPGKGLEWLGMIWGDGNTDYNSALKSRLTISKDNA |
| | | | KSSVYLQMNSLRAEDTAVYYCARDRVTATLYAMDYW |
| | | | GQGTLVTVSS |
| SEQ ID NO: 3089 | VH | C-H-VH.50 | EVQLVESGGGLIQPGGSLRLSCAVSGFSLTAYGVNWVR |
| | | | QPPGKGLEWLGMIWGDGNTDYNSALKSRLTISKDNSKS |
| | | | TVYLQMNSLRAEDTAVYYCARDRVTATLYAMDYWGQ |
| | | | GTLVTVSS |

TABLE 11
Amino acid sequences for anti TCRβ V5 antibodies. Amino acid and nucleotide sequences for
murine and humanized antibody molecules which bind to TCRVB5 (e.g., TCRVB 5-5 or TCRVB 5-6).
The amino acid the heavy and light chain CDRs, and the amino acid and nucleotide sequences
of the heavy and light chain variable regions, and the heavy and light chains are shown.
Murine antibody E, also referred to as MH3-2

| | | |
|---|---|---|
| SEQ ID NO: 1298 | HC CDR1 (Kabat) | SSWMN |
| SEQ ID NO: 1299 | HC CDR2 (Kabat) | RIYPGDGDTKYNGKFKG |
| SEQ ID NO: 1300 | HC CDR3 (Kabat) | RGTGGWYFDV |
| SEQ ID NO: 1302 | HC CDR1 (Chothia) | GYAFSSS |
| SEQ ID NO: 1303 | HC CDR2 (Chothia) | YPGDGD |
| SEQ ID NO: 1301 | HC CDR3 (Chothia) | RGTGGWYFDV |
| SEQ ID NO: 1304 | HC CDR1 (Combined) | GYAFSSSWMN |
| SEQ ID NO: 1299 | HC CDR2 (Combined)) | RIYPGDGDTKYNGKFKG |
| SEQ ID NO: 1301 | HC CDR3 (Combined) | RGTGGWYFDV |
| SEQ ID NO: 1305 | LC CDR1 (Kabat) | RASESVDSSGNSFMH |
| SEQ ID NO: 1306 | LC CDR2 (Kabat) | RASNLES |
| SEQ ID NO: 1307 | LC CDR3 (Kabat) | QQSFDDPFT |
| SEQ ID NO: 1308 | LC CDR1 (Chothia) | SESVDSSGNSF |
| SEQ ID NO: 1306 | LC CDR2 (Chothia) | RASNLES |
| SEQ ID NO: 1307 | LC CDR3 (Chothia) | QQSFDDPFT |
| SEQ ID NO: 1305 | LC CDR1 (Combined) | RASESVDSSGNSFMH |
| SEQ ID NO: 1306 | LC CDR2 (Combined) | RASNLES |
| SEQ ID NO: 1307 | LC CDR3 (Combined) | QQSFDDPFT |
| SEQ ID NO: 3091 | VH | QVQLQQSGPELVKPGASVKISCKASGYAFSSSWMNWV |
| | | KQRPGQGLEWIGRIYPGDGDTKYNGKFKGKATLTADKS |
| | | SSTAYMHLSSLTSVDSAVYFCARRGTGGWYFDVWGAG |
| | | TTVTVSS |
| SEQ ID NO: 3284 | Heavy chain | METDTLLLWVLLLWVPGSTGQVQLQQSGPELVKPGAS |
| | | VKISCKASGYAFSSSWMNWVKQRPGQGLEWIGRIYPGD |
| | | GDTKYNGKFKGKATLTADKSSSTAYMHLSSLTSVDSAV |
| | | YFCARRGTGGWYFDVWGAGTTVTVSSAKTTAPSVYPL |
| | | APVCGDTTGSSVTLGCLVKGYFPEPVTLTWNSGSLSSG |
| | | VHTFPAVLQSDLYTLSSSVTVTSSTWPSQSITCNVAHPA |
| | | SSTKVDKKIEPRGPTIKPCPPCKCPAPNLLGGPSVFIFPPK |
| | | IKDVLMISLSPIVTCVVVDVSEDDPDVQISWFVNNVEVH |
| | | TAQTQTHREDYNSTLRVVSALPIQHQDWMSGKEFKCK |
| | | VNNKDLPAPIERTISKPKGSVRAPQVYVLPPPEEEMTKK |
| | | QVTLTCMVTDFMPEDIYVEWTNNGKTELNYKNTEPVL |
| | | DSDGSYFMYSKLRVEKKNWVERNSYSCSVVHEGLHNH |
| | | HTTKSFSRTPGK |
| SEQ ID NO: 3092 | VL | DIVLTQSPASLAVSLGQRATISCRASESVDSSGNSFMHW |
| | | YQQKPGQPPQLLIYRASNLESGIPARFSGSGSRTDFTLTI |
| | | NPVEADDVATFYCQQSFDDPFTFGSGTKLEIK |
| SEQ ID NO: 3285 | Light chain | METDTLLLWVLLLWVPGSTGDIVLTQSPASLAVSLGQR |
| | | ATISCRASESVDSSGNSFMHWYQQKPGQPPQLLIYRASN |
| | | LESGIPARFSGSGSRTDFTLTINPVEADDVATFYCQQSFD |
| | | DPFTFGSGTKLEIKRADAAPTVSIFPPSSEQLTSGGASVV |
| | | CFLNNFYPKDINVKWKIDGSERQNGVLNSWTDQDSKDS |
| | | TYSMSSTLTLTKDEYERHNSYTCEATHKTSTSPIVKSFN |
| | | RNEC |

Humanized antibody E (E-H antibody)
Variable light chain (VL)

| | | | |
|---|---|---|---|
| SEQ ID NO: 3093 | VL | E-H.1 | DIVLTQSPDSLAVSLGERATINCRASESVDSSGNSFMHWYQQ |
| | | | KPGQPPQLLIYRASNLESGVPDRFSGSGSRTDFTLTISSLQAED |
| | | | VAVYYCQQSFDDPFTFGQGTKLEIK |
| SEQ ID NO: 3094 | VL | E-H.2 | EIVLTQSPATLSLSPGERATLSCRASESVDSSGNSFMHWYQQ |
| | | | KPGQAPQLLIYRASNLESGIPARFSGSGSRTDFTLTISSLEPEDF |
| | | | AVYYCQQSFDDPFTFGQGTKLEIK |
| SEQ ID NO: 3095 | VL | E-H.3 | EIVLTQSPATLSLSPGERATLSCRASESVDSSGNSFMHWYQQ |
| | | | KPGQAPQLLIYRASNLESGIPARFSGSGSRTDFTLTISRLEPED |
| | | | FAVYYCQQSFDDPFTFGQGTKLEIK |
| SEQ ID NO: 3096 | VL | E-H.4 | EIVLTQSPATLSLSPGERATLSCRASESVDSSGNSFMHWYQQ |
| | | | KPGQAPQLLIYRASNLESGIPARFSGSGSRTDFTLTISSLQPED |
| | | | FAVYYCQQSFDDPFTFGQGTKLEIK |
| SEQ ID NO: 3097 | VL | E-H.5 | DIQLTQSPSSLSASVGDRVTITCRASESVDSSGNSFMHWYQQ |
| | | | KPGQAPQLLIYRASNLESGVPSRFSGSGSRTDFTLTISSLQPED |
| | | | VATYYCQQSFDDPFTFGQGTKLEIK |
| SEQ ID NO: 3098 | VL | E-H.6 | EIVLTQSPATLSLSPGERATLSCRASESVDSSGNSFMHWYQQ |
| | | | KPGQAPQLLIYRASNLESGIPARFSGSGPRTDFTLTISSLEPEDF |
| | | | AVYYCQQSFDDPFTFGQGTKLEIK |
| SEQ ID NO: 3099 | VL | E-H.7 | EIVLTQSPATLSLSPGERATLSCRASESVDSSGNSFMHWYQQ |
| | | | KPGQAPQLLIYRASNLESGIPDRFSGSGSRTDFTLTISRLEPED |
| | | | FAVYYCQQSFDDPFTFGQGTKLEIK |
| SEQ ID NO: 3100 | VL | E-H.8 | DIQLTQSPSSLSASVGDRVTITCRASESVDSSGNSFMHWYQQ |
| | | | KPGKVPQLLIYRASNLESGVPSRFSGSGSRTDFTLTISSLQPED |
| | | | VATYYCQQSFDDPFTFGQGTKLEIK |
| SEQ ID NO: 3101 | VL | E-H.9 | DIQLTQSPSSLSASVGDRVTITCRASESVDSSGNSFMHWYQQ |
| | | | KPGKTPQLLIYRASNLESGIPSRFSGSGSRTDFTLTIRSLQPEDF |
| | | | ATYYCQQSFDDPFTFGQGTKLEIK |
| SEQ ID NO: 3102 | VL | E-H.10 | EIVLTQSPGTLSLSPGERATLSCRASESVDSSGNSFMHWYQQ |
| | | | KPGQAPQLLIYRASNLESGIPDRFSGSGSRTDFTLTISRLEPED |
| | | | FAVYYCQQSFDDPFTFGQGTKLEIK |
| SEQ ID NO: 3103 | VL | E-H.11 | EIVLTQSPATLSLSPGERATLSCRASESVDSSGNSFMHWYQQ |
| | | | KPGLAPQLLIYRASNLESGIPDRFSGSGSRTDFTLTISRLEPEDF |
| | | | AVYYCQQSFDDPFTFGQGTKLEIK |
| SEQ ID NO: 3104 | VL | E-H.12 | DIQLTQSPSSLSASVGDRVTITCRASESVDSSGNSFMHWYQQ |
| | | | KPGKAPQLLIYRASNLESGVPSRFSGSGSRTDFTLTISSLQPED |
| | | | FATYYCQQSFDDPFTFGQGTKLEIK |
| SEQ ID NO: 3105 | VL | E-H.13 | DIQLTQSPSSVSASVGDRVTITCRASESVDSSGNSFMHWYQQ |
| | | | KPGKAPQLLIYRASNLESGVPSRFSGSGSRTDFTLTISSLQPED |
| | | | FATYYCQQSFDDPFTFGQGTKLEIK |
| SEQ ID NO: 3106 | VL | E-H.14 | AIQLTQSPSSLSASVGDRVTITCRASESVDSSGNSFMHWYQQ |
| | | | KPGKAPQLLIYRASNLESGVPSRFSGSGSRTDFTLTISSLQPED |
| | | | FATYYCQQSFDDPFTFGQGTKLEIK |
| SEQ ID NO: 3107 | VL | E-H.15 | DIQLTQSPSFLSASVGDRVTITCRASESVDSSGNSFMHWYQQ |
| | | | KPGKAPQLLIYRASNLESGVPSRFSGSGSRTEFTLTISSLQPED |
| | | | FATYYCQQSFDDPFTFGQGTKLEIK |
| SEQ ID NO: 3108 | VL | E-H.16 | DIQLTQSPSSLSASVGDRVTITCRASESVDSSGNSFMHWYQQ |
| | | | KPGKAPQLLIYRASNLESGVPSRFSGSGSRTDFTFTISSLQPEDI |
| | | | ATYYCQQSFDDPFTFGQGTKLEIK |
| SEQ ID NO: 3109 | VL | E-H.17 | EIVLTQSPATLSVSPGERATLSCRASESVDSSGNSFMHWYQQ |
| | | | KPGQAPQLLIYRASNLESGIPARFSGSGSRTEFTLTISILQSEDF |
| | | | AVYYCQQSFDDPFTFGQGTKLEIK |
| SEQ ID NO: 3110 | VL | E-H.18 | EIVLTQSPATLSVSPGERATLSCRASESVDSSGNSFMHWYQQ |
| | | | KPGQAPQLLIYRASNLESGIPARFSGSGSRTEFTLTISSLQSEDF |
| | | | AVYYCQQSFDDPFTFGQGTKLEIK |
| SEQ ID NO: 3111 | VL | E-H.19 | AIRLTQSPFSLSASVGDRVTITCRASESVDSSGNSFMHWYQQ |
| | | | KPAKAPQLFIYRASNLESGVPSRFSGSGSRTDFTLTISSLQPED |
| | | | FATYYCQQSFDDPFTFGQGTKLEIK |
| SEQ ID NO: 3112 | VL | E-H.20 | DIQLTQSPSSLSASVGDRVTITCRASESVDSSGNSFMHWYQQ |
| | | | KPGKAPQSLIYRASNLESGVPSRFSGSGSRTDFTLTISSLQPED |
| | | | FATYYCQQSFDDPFTFGQGTKLEIK |
| SEQ ID NO: 3113 | VL | E-H.21 | DIQLTQSPSSLSASVGDRVTITCRASESVDSSGNSFMHWYQQ |
| | | | KPGKAPQRLIYRASNLESGVPSRFSGSGSRTEFTLTISNLQPED |
| | | | FATYYCQQSFDDPFTFGQGTKLEIK |
| SEQ ID NO: 3114 | VL | E-H.22 | DIQLTQSPSTLSASVGDRVTITCRASESVDSSGNSFMHWYQQ |
| | | | KPGKAPQLLIYRASNLESGVPSRFSGSGSRTEFTLTISSLQPDD |
| | | | FATYYCQQSFDDPFTFGQGTKLEIK |
| SEQ ID NO: 3115 | VL | E-H.23 | EIVLTQSPDFQSVTPKEKVTITCRASESVDSSGNSFMHWYQQ |
| | | | KPDQSPQLLIYRASNLESGVPSRFSGSGSRTDFTLTINSLEAED |
| | | | AATYYCQQSFDDPFTFGQGTKLEIK |
| SEQ ID NO: 3116 | VL | E-H.24 | DIQLTQSPSSLSASVGDRVTITCRASESVDSSGNSFMHWYQQ |
| | | | KPGKAPQSLIYRASNLESGVPSKFSGSGSRTDFTLTISSLQPED |
| | | | FATYYCQQSFDDPFTFGQGTKLEIK |
| SEQ ID NO: 3117 | VL | E-H.25 | DIQLTQSPSSLSASVGDRVTITCRASESVDSSGNSFMHWYQQ |
| | | | KPGKAPQRLIYRASNLESGVPSRFSGSGSRTEFTLTISSLQPED |
| | | | FATYYCQQSFDDPFTFGQGTKLEIK |
| SEQ ID NO: 3118 | VL | E-H.26 | DIVLTQTPLSLSVTPGQPASISCRASESVDSSGNSFMHWYLQK |
| | | | PGQPPQLLIYRASNLESGVPDRFSGSGSRTDFTLKISRVEAED |
| | | | VGVYYCQQSFDDPFTFGQGTKLEIK |
| SEQ ID NO: 3119 | VL | E-H.27 | DIQLTQSPSSLSASVGDRVTITCRASESVDSSGNSFMHWYQQ |
| | | | KPEKAPQSLIYRASNLESGVPSRFSGSGSRTDFTLTISSLQPED |
| | | | FATYYCQQSFDDPFTFGQGTKLEIK |
| SEQ ID NO: 3120 | VL | E-H.28 | EIVLTQSPPTLSLSPGERVTLSCRASESVDSSGNSFMHWYQQK |
| | | | PGQAPQLLIYRASNLESGIPARFSGSGSRTDFTLTISSLQPEDF |
| | | | AVYYCQQSFDDPFTFGQGTKLEIK |
| SEQ ID NO: 3121 | VL | E-H.29 | DIQLTQSPSAMSASVGDRVTITCRASESVDSSGNSFMHWYQQ |
| | | | KPGKVPQRLIYRASNLESGVPSRFSGSGSRTEFTLTISSLQPED |
| | | | FATYYCQQSFDDPFTFGQGTKLEIK |
| SEQ ID NO: 3122 | VL | E-H.30 | DIVLTQSPLSLPVTPGEPASISCRASESVDSSGNSFMHWYLQK |
| | | | PGQSPQLLIYRASNLESGVPDRFSGSGSRTDFTLKISRVEAED |
| | | | VGVYYCQQSFDDPFTFGQGTKLEIK |
| SEQ ID NO: 3123 | VL | E-H.31 | DIVLTQTPLSLPVTPGEPASISCRASESVDSSGNSFMHWYLQK |
| | | | PGQSPQLLIYRASNLESGVPDRFSGSGSRTDFTLKISRVEAED |
| | | | VGVYYCQQSFDDPFTFGQGTKLEIK |
| SEQ ID NO: 3124 | VL | E-H.32 | DIVLTQTPLSLSVTPGQPASISCRASESVDSSGNSFMHWYLQK |
| | | | PGQSPQLLIYRASNLESGVPDRFSGSGSRTDFTLKISRVEAED |
| | | | VGVYYCQQSFDDPFTFGQGTKLEIK |
| SEQ ID NO: 3125 | VL | E-H.33 | EIVLTQSPPTLSLSPGERVTLSCRASESVDSSGNSFMHWYQQK |
| | | | PGQAPQLLIYRASNLESSIPARFSGSGSRTDFTLTISSLQPEDFA |
| | | | VYYCQQSFDDPFTFGQGTKLEIK |
| SEQ ID NO: 3126 | VL | E-H.34 | DIVLTQSPLSLPVTLGQPASISCRASESVDSSGNSFMHWYQQR |
| | | | PGQSPQRLIYRASNLESGVPDRFSGSGSRTDFTLKISRVEAED |
| | | | VGVYYCQQSFDDPFTFGQGTKLEIK |
| SEQ ID NO: 3127 | VL | E-H.35 | DIVLTQTPLSSPVTLGQPASISCRASESVDSSGNSFMHWYQQR |
| | | | PGQPPQLLIYRASNLESGVPDRFSGSGARTDFTLKISRVEAED |
| | | | VGVYYCQQSFDDPFTFGQGTKLEIK |
| SEQ ID NO: 3128 | VL | E-H.36 | DIVLTQSPAFLSVTPGEKVTITCRASESVDSSGNSFMHWYQQ |
| | | | KPDQAPQLLIYRASNLESGVPSRFSGSGSRTDFTFTISSLEAED |
| | | | AATYYCQQSFDDPFTFGQGTKLEIK |
| SEQ ID NO: 3129 | VL | E-H.37 | DIQLIQSPSFLSASVGDRVSIICRASESVDSSGNSFMHWYLQKP |
| | | | GKSPQLFIYRASNLESGVSSRFSGRGSRTDFTLTIISLKPEDFA |
| | | | AYYCQQSFDDPFTFGQGTKLEIK |
| SEQ ID NO: 3130 | VL | E-H.38 | EIVLTQTPLSLSITPGEQASISCRASESVDSSGNSFMHWYLQK |
| | | | ARPVPQLLIYRASNLESGVPDRFSGSGSRTDFTLKISRVEAED |
| | | | FGVYYCQQSFDDPFTFGQGTKLEIK |
| SEQ ID NO: 3131 | VL | E-H.39 | EIVLTQTPLSLSITPGEQASMSCRASESVDSSGNSFMHWYLQK |
| | | | ARPVPQLLIYRASNLESGVPDRFSGSGSRTDFTLKISRVEAED |
| | | | FGVYYCQQSFDDPFTFGQGTKLEIK |
| SEQ ID NO: 3132 | VL | E-H.40 | EITLTQSPAFMSATPGDKVNISCRASESVDSSGNSFMHWYQQ |
| | | | KPGEAPQFIIYRASNLESGIPPRFSGSGYRTDFTLTINNIESEDA |
| | | | AYYYCQQSFDDPFTFGQGTKLEIK |

Variable HEAVY chain (VH)

| | | | |
|---|---|---|---|
| SEQ ID NO: 3133 | VH | E-H.1 | QVQLVQSGAEVKKPGASVKVSCKASGYAFSSSWMNWVRQA |
| | | | PGQGLEWIGRIYPGDGDTKYNGKFKGRATLTADKSTSTAYM |
| | | | ELSSLRSEDTAVYYCARRGTGGWYFDVWGQGTTVTVSS |
| SEQ ID NO: 3134 | VH | E-H.2 | QVQLVQSGAEVKKPGSSVKVSCKASGYAFSSSWMNWVRQA |
| | | | PGQGLEWIGRIYPGDGDTKYNGKFKGRATLTADKSTSTAYM |
| | | | ELSSLRSEDTAVYYCARRGTGGWYFDVWGQGTTVTVSS |
| SEQ ID NO: 3135 | VH | E-H.3 | QVQLVQSGAEVKKPGASVKVSCKASGYAFSSSWMNWVRQA |
| | | | PGKGLEWIGRIYPGDGDTKYNGKFKGRATLTADKSTSTAYM |
| | | | ELSSLRSEDTAVYYCARRGTGGWYFDVWGQGTTVTVSS |
| SEQ ID NO: 3136 | VH | E-H.4 | QVQLVQSGAEVKKPGASVKVSCKASGYAFSSSWMNWVRQA |
| | | | PGQELEWIGRIYPGDGDTKYNGKFKGRATLTADKSISTAYME |
| | | | LSSLRSEDTATYYCARRGTGGWYFDVWGQGTTVTVSS |
| SEQ ID NO: 3137 | VH | E-H.5 | EVQLVQSGAEVKKPGATVKISCKASGYAFSSSWMNWVQQA |
| | | | PGKGLEWIGRIYPGDGDTKYNGKFKGRATLTADKSTSTAYM |
| | | | ELSSLRSEDTAVYYCARRGTGGWYFDVWGQGTTVTVSS |
| SEQ ID NO: 3138 | VH | E-H.6 | QVQLVQSGAEVKKTGSSVKVSCKASGYAFSSSWMNWVRQA |
| | | | PGQALEWIGRIYPGDGDTKYNGKFKGRATLTADKSMSTAYM |
| | | | ELSSLRSEDTAMYYCARRGTGGWYFDVWGQGTTVTVSS |
| SEQ ID NO: 3139 | VH | E-H.7 | QVQLVQSGAEVKKPGASVKVSCKASGYAFSSSWMNWVRQA |
| | | | PGQRLEWIGRIYPGDGDTKYNGKFKGRATLTADKSASTAYM |
| | | | ELSSLRSEDMAVYYCARRGTGGWYFDVWGQGTTVTVSS |
| SEQ ID NO: 3140 | VH | E-H.8 | QVQLVQSGAEVKKPGASVKVSCKASGYAFSSSWMNWVRQA |
| | | | PGQGLEWIGRIYPGDGDTKYNGKFKGRATLTADKSTSTAYM |
| | | | ELRSLRSDDMAVYYCARRGTGGWYFDVWGQGTTVTVSS |
| SEQ ID NO: 3141 | VH | E-H.9 | QVQLVQSGAEVKKPGASVKVSCKASGYAFSSSWMNWVRQA |
| | | | PGQRLEWIGRIYPGDGDTKYNGKFKGRATLTADKSASTAYM |
| | | | ELSSLRSEDTAVYYCARRGTGGWYFDVWGQGTTVTVSS |
| SEQ ID NO: 3142 | VH | E-H.10 | QVQLVQSGAEVKKPGASVKVSCKASGYAFSSSWMNWVRQA |
| | | | PGQGLEWIGRIYPGDGDTKYNGKFKGRATLTADKSTSTAYM |
| | | | ELRSLRSDDTAVYYCARRGTGGWYFDVWGQGTTVTVSS |
| SEQ ID NO: 3143 | VH | E-H.11 | QVQLVQSGAEVKKPGASVKVSCKASGYAFSSSWMNWVRQA |
| | | | PGQGLEWIGRIYPGDGDTKYNGKFKGRATLTADKSISTAYM |
| | | | ELSRLRSDDTAVYYCARRGTGGWYFDVWGQGTTVTVSS |
| SEQ ID NO: 3144 | VH | E-H.12 | QVQLVQSGAEVKKPGASVKVSCKASGYAFSSSWMNWVRQA |
| | | | PGQGLEWIGRIYPGDGDTKYNGKFKGRATLTADKSISTAYM |
| | | | ELSRLRSDDTVVYYCARRGTGGWYFDVWGQGTTVTVSS |
| SEQ ID NO: 3145 | VH | E-H.13 | QVQLVQSGAEVKKPGASVKVSCKASGYAFSSSWMNWVRQA |
| | | | PGQGLEWIGRIYPGDGDTKYNGKFKGWATLTADKSISTAYM |
| | | | ELSRLRSDDTAVYYCARRGTGGWYFDVWGQGTTVTVSS |
| SEQ ID NO: 3146 | VH | E-H.14 | QVQLVQSGAEVKKPGASVKVSCKASGYAFSSSWMNWVRQA |
| | | | TGQGLEWIGRIYPGDGDTKYNGKFKGRATLTANKSISTAYM |
| | | | ELSSLRSEDTAVYYCARRGTGGWYFDVWGQGTTVTVSS |
| SEQ ID NO: 3147 | VH | E-H.15 | QVQLVQSGSELKKPGASVKVSCKASGYAFSSSWMNWVRQA |
| | | | PGQGLEWIGRIYPGDGDTKYNGKFKGRAVLSADKSVSTAYL |
| | | | QISSLKAEDTAVYYCARRGTGGWYFDVWGQGTTVTVSS |
| SEQ ID NO: 3148 | VH | E-H.16 | QVQLVQSGPEVKKPGTSVKVSCKASGYAFSSSWMNWVRQA |
| | | | RGQRLEWIGRIYPGDGDTKYNGKFKGRATLTADKSTSTAYM |
| | | | ELSSLRSEDTAVYYCARRGTGGWYFDVWGQGTTVTVSS |
| SEQ ID NO: 3149 | VH | E-H.17 | EVQLVQSGAEVKKPGESLKISCKASGYAFSSSWMNWVRQMP |
| | | | GKGLEWIGRIYPGDGDTKYNGKFKGQATLSADKSISTAYLQ |
| | | | WSSLKASDTAMYYCARRGTGGWYFDVWGQGTTVTVSS |
| SEQ ID NO: 3150 | VH | E-H.18 | QVQLVQSGSELKKPGASVKVSCKASGYAFSSSWMNWVRQA |
| | | | PGQGLEWIGRIYPGDGDTKYNGKFKGRAVLSADKSVSMAYL |
| | | | QISSLKAEDTAVYYCARRGTGGWYFDVWGQGTTVTVSS |
| SEQ ID NO: 3151 | VH | E-H.19 | QVQLVQSGHEVKQPGASVKVSCKASGYAFSSSWMNWVPQA |
| | | | PGQGLEWIGRIYPGDGDTKYNGKFKGRAVLSADKSASTAYL |
| | | | QISSLKAEDMAMYYCARRGTGGWYFDVWGQGTTVTVSS |
| SEQ ID NO: 3152 | VH | E-H.20 | EVQLVQSGAEVKKPGESLKISCKASGYAFSSSWMNWVRQMP |
| | | | GKGLEWIGRIYPGDGDTKYNGKFKGQATLSADKPISTAYLQ |
| | | | WSSLKASDTAMYYCARRGTGGWYFDVWGQGTTVTVSS |
| SEQ ID NO: 3153 | VH | E-H.21 | EVQLVQSGAEVKKPGESLRISCKASGYAFSSSWMNWVRQMP |
| | | | GKGLEWIGRIYPGDGDTKYNGKFKGQATLSADKSISTAYLQ |
| | | | WSSLKASDTAMYYCARRGTGGWYFDVWGQGTTVTVSS |
| SEQ ID NO: 3154 | VH | E-H.22 | EVQLVQSGAEVKKPGESLRISCKASGYAFSSSWMNWVRQMP |
| | | | GKGLEWIGRIYPGDGDTKYNGKFKGHATLSADKSISTAYLQ |
| | | | WSSLKASDTAMYYCARRGTGGWYFDVWGQGTTVTVSS |
| SEQ ID NO: 3155 | VH | E-H.23 | QVQLVQSGAEVKKTGSSVKVSCKASGYAFSSSWMNWVRQA |
| | | | PRQALEWIGRIYPGDGDTKYNGKFKGRATLTADKSMSTAYM |
| | | | ELSSLRSEDTAMYYCARRGTGGWYFDVWGQGTTVTVSS |
| SEQ ID NO: 3156 | VH | E-H.24 | EVQLVESGGGLVQPGRSLRLSCTASGYAFSSSWMNWVRQAP |
| | | | GKGLEWIGRIYPGDGDTKYNGKFKGRATLSADKSKSIAYLQ |
| | | | MNSLKTEDTAVYYCARRGTGGWYFDVWGQGTTVTVSS |
| SEQ ID NO: 3157 | VH | E-H.25 | EVQLVESGGGLVQPGPSLRLSCTASGYAFSSSWMNWVRQAP |
| | | | GKGLEWIGRIYPGDGDTKYNGKFKGRATLSADKSKSIAYLQ |
| | | | MNSLKTEDTAVYYCARRGTGGWYFDVWGQGTTVTVSS |
| SEQ ID NO: 3158 | VH | E-H.26 | QVQLQESGPGLVKPSQTLSLTCTASGYAFSSSWMNWVRQPP |
| | | | GKGLEWIGRIYPGDGDTKYNGKFKGRATLSADKSKSQASLK |
| | | | LSSVTAADTAVYYCARRGTGGWYFDVWGQGTTVTVSS |
| SEQ ID NO: 3159 | VH | E-H.27 | QVQLQESGPGLVKPSGTLSLTCAASGYAFSSSWMNWVRQPP |
| | | | GKGLEWIGRIYPGDGDTKYNGKFKGRATLSADKSKSQASLK |
| | | | LSSVTAADTAVYYCARRGTGGWYFDVWGQGTTVTVSS |
| SEQ ID NO: 3160 | VH | E-H.28 | EVQLVESGGGLVKPGRSLRLSCTASGYAFSSSWMNWVRQAP |
| | | | GKGLEWIGRIYPGDGDTKYNGKFKGRATLSADKSKSIAYLQ |
| | | | MNSLKTEDTAVYYCARRGTGGWYFDVWGQGTTVTVSS |
| SEQ ID NO: 3161 | VH | E-H.29 | EVQLVESGGGLVQPGGSLKLSCAASGYAFSSSWMNWVRQA |
| | | | SGKGLEWIGRIYPGDGDTKYNGKFKGRATLSADKSKSTAYL |
| | | | QMNSLKTEDTAVYYCARRGTGGWYFDVWGQGTTVTVSS |
| SEQ ID NO: 3162 | VH | E-H.30 | QVQLQESGPGLVKPSQTLSLTCAASGYAFSSSWMNWVRQPP |
| | | | GKGLEWIGRIYPGDGDTKYNGKFKGRATLSADKSKSQASLK |
| | | | LSSVTAADTAVYYCARRGTGGWYFDVWGQGTTVTVSS |
| SEQ ID NO: 3163 | VH | E-H.31 | EVQLVESGGGLVKPGGSLRLSCAASGYAFSSSWMNWVRQA |
| | | | PGKGLEWIGRIYPGDGDTKYNGKFKGRATLSADKSKSTAYL |
| | | | QMNSLKTEDTAVYYCARRGTGGWYFDVWGQGTTVTVSS |
| SEQ ID NO: 3164 | VH | E-H.32 | EVQLVESGGALVKPGGSLRLSCAASGYAFSSSWMNWVRQA |
| | | | PGKGLEWIGRIYPGDGDTKYNGKFKGRATLSADKSKSTAYL |
| | | | QMNSLKTEDTAVYYCARRGTGGWYFDVWGQGTTVTVSS |
| SEQ ID NO: 3165 | VH | E-H.33 | QVQLQESGPGLVKPSQTLSLTCAAYGYAFSSSWMNWVRQPP |
| | | | GKGLEWIGRIYPGDGDTKYNGKFKGRATLSADKSKSQASLK |
| | | | LSSVTAADTAVYYCARRGTGGWYFDVWGQGTTVTVSS |
| SEQ ID NO: 3166 | VH | E-H.34 | QVQLQESGSGLVKPSQTLSLTCAASGYAFSSSWMNWVRQPP |
| | | | GKGLEWIGRIYPGDGDTKYNGKFKGRATLSADKSKSQASLK |
| | | | LSSVTAADTAVYYCARRGTGGWYFDVWGQGTTVTVSS |
| SEQ ID NO: 3167 | VH | E-H.35 | EVQLVESGGGLVQPGGSLRLSCAASGYAFSSSWMNWVRQA |
| | | | PGKGLEWIGRIYPGDGDTKYNGKFKGRATLSADKSKSSAYL |
| | | | QMNSLKTEDTAVYYCARRGTGGWYFDVWGQGTTVTVSS |
| SEQ ID NO: 3168 | VH | E-H.36 | QVQLQESGPGLVKPSDTLSLTCTASGYAFSSSWMNWVRQPP |
| | | | GKGLEWIGRIYPGDGDTKYNGKFKGRATLSADKSKSQASLK |
| | | | LSSVTAADTAVYYCARRGTGGWYFDVWGQGTTVTVSS |
| SEQ ID NO: 3169 | VH | E-H.37 | QVQLQESGPGLVKPSQTLSLTCTASGYAFSSSWMNWVRQHP |
| | | | GKGLEWIGRIYPGDGDTKYNGKFKGRATLSADKSKSQASLK |
| | | | LSSVTAADTAVYYCARRGTGGWYFDVWGQGTTVTVSS |
| SEQ ID NO: 3170 | VH | E-H.38 | QVQLQESGPGLVKPSQTLSLTCTASGYAFSSSWMNWVRQHP |
| | | | GKGLEWIGRIYPGDGDTKYNGKFKGLATLSADKSKSQASLK |
| | | | LSSVTAADTAVYYCARRGTGGWYFDVWGQGTTVTVSS |
| SEQ ID NO: 3171 | VH | E-H.39 | QVQLVESGGGVVQPGRSLRLSCAASGYAFSSSWMNWVRQA |
| | | | PGKGLEWIGRIYPGDGDTKYNGKFKGRATLSADKSKSTAYL |
| | | | QMSSLRAEDTAVYYCARRGTGGWYFDVWGQGTTVTVSS |
| SEQ ID NO: 3172 | VH | E-H.40 | QVQLVESGGGLVKPGGSLRLSCAASGYAFSSSWMNWVRQA |
| | | | PGKGLEWIGRIYPGDGDTKYNGKFKGRATLSADKAKSSAYL |
| | | | QMNSLRAEDTAVYYCARRGTGGWYFDVWGQGTTVTVSS |
| SEQ ID NO: 3173 | VH | E-H.41 | QVQLVESGGGLVQPGGSLRLSCSASGYAFSSSWMNWVRQAP |
| | | | GKGLEWIGRIYPGDGDTKYNGKFKGRATLSADKSKSTAYLQ |
| | | | MNSLRAEDTAVYYCARRGTGGWYFDVWGQGTTVTVSS |
| SEQ ID NO: 3174 | VH | E-H.42 | QVQLLESGGGLVKPGGSLRLSCAASGYAFSSSWMNWVRQA |
| | | | PGKGLEWIGRIYPGDGDTKYNGKFKGRATLSADKAKSSAYL |
| | | | QMNSLRAEDTAVYYCARRGTGGWYFDVWGQGTTVTVSS |
| SEQ ID NO: 3175 | VH | E-H.43 | EVQLVESGGGLVQPGGSLRLSCSASGYAFSSSWMNWVRQAP |
| | | | GKGLEWIGRIYPGDGDTKYNGKFKGRATLSADKSKSTAYLQ |
| | | | MSSLRAEDTAVYYCARRGTGGWYFDVWGQGTTVTVSS |
| SEQ ID NO: 3176 | VH | E-H.44 | QVQLQESGPGLVKPSDTLSLTCAASGYAFSSSWMNWVRQPP |
| | | | GKGLEWIGRIYPGDGDTKYNGKFKGRATLSADKSKSQASLK |
| | | | LSSVTAVDTAVYYCARRGTGGWYFDVWGQGTTVTVSS |
| SEQ ID NO: 3177 | VH | E-H.45 | QVQLQESGPGLVKPSQTLSLTCAASGYAFSSSWMNWVRQPP |
| | | | GKGLEWIGRIYPGDGDTKYNGKFKGRATLSADKSKSQASLK |
| | | | LSSVTAVDTAVYYCARRGTGGWYFDVWGQGTTVTVSS |
| SEQ ID NO: 3178 | VH | E-H.46 | EVQLVESGGGLVQPGGSLRLSCSASGYAFSSSWMNWVRQAP |
| | | | GKGLEWIGRIYPGDGDTKYNGKFKGRATLSADKSKSTAYVQ |
| | | | MSSLRAEDTAVYYCARRGTGGWYFDVWGQGTTVTVSS |
| SEQ ID NO: 3179 | VH | E-H.47 | QVQLVDSGGGVVQPGRSLRLSCAASGYAFSSSWMNWVRQA |
| | | | PGKGLEWIGRIYPGDGDTKYNGKFKGRATLSADKSKSTAYL |
| | | | QMNSLRAEDTAVYYCARRGTGGWYFDVWGQGTTVTVSS |
| SEQ ID NO: 3180 | VH | E-H.48 | QVQLVESGGGVVQPGRSLRLSCAASGYAFSSSWMNWVRQA |
| | | | PGKGLEWIGRIYPGDGDTKYNGKFKGRATLSADKSKSTAYL |
| | | | QMNSLRAEGTAVYYCARRGTGGWYFDVWGQGTTVTVSS |
| SEQ ID NO: 3181 | VH | E-H.49 | QVQLVESGGGVVQPGRSLRLSCAASGYAFSSSWMNWVRQA |
| | | | PGKGLEWIGRIYPGDGDTKYNGKFKGRATLSADKSKSTAYL |
| | | | QMNSLRAEDTAVYYCARRGTGGWYFDVWGQGTTVTVSS |
| SEQ ID NO: 3182 | VH | E-H.50 | EVQLVESGGGLVQPGGSLRLSCAASGYAFSSSWMNWVRQA |
| | | | PGKGLEWIGRIYPGDGDTKYNGKFKGRATLSADKSKSTAYL |
| | | | QMNSLRAEDTAVYYCARRGTGGWYFDVWGQGTTVTVSS |

TABLE 12
Amino acid sequences for anti TCRβ V10 antibodies. Amino acid and nucleotide sequences for
murine and humanized antibody molecules which bind to TCRBV 10 (e.g., TCRBV 10-1, TCRBV 10-2
or TCRBV 10-3). The amino acid the heavy and light chain CDRs, and the amino acid and
nucleotide sequences of the heavy and light chain variable regions, and the heavy and light
chains are shown.
Murine antibody D, also referred to as S511 antibody

| | | |
|---|---|---|
| SEQ ID NO: 1288 | HC CDR1 (Kabat) | SYGMS |
| SEQ ID NO: 1289 | HC CDR2 (Kabat) | LISSGGSYTYYTDSVKG |
| SEQ ID NO: 1290 | HC CDR3 (Kabat) | HGGNFFDY |
| SEQ ID NO: 1291 | HC CDR1 (Chothia) | GFTFRSY |
| SEQ ID NO: 1292 | HC CDR2 (Chothia) | SSGGSY |
| SEQ ID NO: 1290 | HC CDR3 (Chothia) | HGGNFFDY |
| SEQ ID NO: 1293 | HC CDR1 (Combined) | GFTFRSYGMS |
| SEQ ID NO: 1289 | HC CDR2 (Combined)) | LISSGGSYTYYTDSVKG |
| SEQ ID NO: 1290 | HC CDR3 (Combined) | HGGNFFDY |
| SEQ ID NO: 1294 | LC CDR1 (Kabat) | SVSSSVSYMH |
| SEQ ID NO: 1295 | LC CDR2 (Kabat) | DTSKLAS |
| SEQ ID NO: 1296 | LC CDR3 (Kabat) | QQWSSNPQYT |
| SEQ ID NO: 1297 | LC CDR1 (Chothia) | SSSVSY |
| SEQ ID NO: 1295 | LC CDR2 (Chothia) | DTSKLAS |
| SEQ ID NO: 1296 | LC CDR3 (Chothia) | QQWSSNPQYT |
| SEQ ID NO: 1294 | LC CDR1 (Combined) | SVSSSVSYMH |
| SEQ ID NO: 1295 | LC CDR2 (Combined) | DTSKLAS |
| SEQ ID NO: 1296 | LC CDR3 (Combined) | QQWSSNPQYT |
| SEQ ID NO: 3183 | VH | EVQLVESGGDLVKPGGSLKLSCAVSGFTFRSYGMSWVR |
| | | QTPDKRLEWVALISSGGSYTYYTDSVKGRFTISRDNAKN |
| | | TLYLQMSSLKSEDTAIYYCSRHGGNFFDYWGQGTTLTVS |
| | | S |
| SEQ ID NO: 3184 | VL | QIVLTQSPSIMSASPGEKVTMTCSVSSSVSYMHWYQQKS |
| | | GTSPKRWIYDTSKLASGVPARFSGSGSGTSYSLTISSMEA |
| | | EDAATYYCQQWSSNPQYTFGGGTKLEIK |

Humanized antibody D (D-H antibody)
Variable light chain (VL)

| | | | |
|---|---|---|---|
| SEQ ID NO: 3185 | VL | D-H.1 | DIVLTQSPAFLSVTPGEKVTITCSVSSSVSYMHWYQQKPDQAPK |
| | | | LLIYDTSKLASGVPSRFSGSGSGTDYTFTISSLEAEDAATYYCQQ |
| | | | WSSNPQYTFGQGTKLEIK |
| SEQ ID NO: 3186 | VL | D-H.2 | AIQLTQSPSSLSASVGDRVTITCSVSSSVSYMHWYQQKPGKAPK |
| | | | LLIYDTSKLASGVPSRFSGSGSGTDYTLTISSLQPEDFATYYCQQ |
| | | | WSSNPQYTFGQGTKLEIK |
| SEQ ID NO: 3187 | VL | D-H.3 | DIQLTQSPSFLSASVGDRVTITCSVSSSVSYMHWYQQKPGKAPK |
| | | | LLIYDTSKLASGVPSRFSGSGSGTEYTLTISSLQPEDFATYYCQQ |
| | | | WSSNPQYTFGQGTKLEIK |
| SEQ ID NO: 3188 | VL | D-H.4 | DIQLTQSPSSLSASVGDRVTITCSVSSSVSYMHWYQQKPGKAPK |
| | | | LLIYDTSKLASGVPSRFSGSGSGTDYTLTISSLQPEDFATYYCQQ |
| | | | WSSNPQYTFGQGTKLEIK |
| SEQ ID NO: 3189 | VL | D-H.5 | DIQLTQSPSSVSASVGDRVTITCSVSSSVSYMHWYQQKPGKAPK |
| | | | LLIYDTSKLASGVPSRFSGSGSGTDYTLTISSLQPEDFATYYCQQ |
| | | | WSSNPQYTFGQGTKLEIK |
| SEQ ID NO: 3190 | VL | D-H.6 | DIQLTQSPSSLSASVGDRVTITCSVSSSVSYMHWYQQKPGKVPK |
| | | | LLIYDTSKLASGVPSRFSGSGSGTDYTLTISSLQPEDVATYYCQQ |
| | | | WSSNPQYTFGQGTKLEIK |
| SEQ ID NO: 3191 | VL | D-H.7 | DIQLTQSPSSLSASVGDRVTITCSVSSSVSYMHWYQQKPGQAPK |
| | | | LLIYDTSKLASGVPSRFSGSGSGTDYTLTISSLQPEDVATYYCQQ |
| | | | WSSNPQYTFGQGTKLEIK |
| SEQ ID NO: 3192 | VL | D-H.8 | EIVLTQSPDFQSVTPKEKVTITCSVSSSVSYMHWYQQKPDQSPKL |
| | | | LIYDTSKLASGVPSRFSGSGSGTDYTLTINSLEAEDAATYYCQQ |
| | | | WSSNPQYTFGQGTKLEIK |
| SEQ ID NO: 3193 | VL | D-H.9 | AIRLTQSPFSLSASVGDRVTITCSVSSSVSYMHWYQQKPAKAPK |
| | | | LFIYDTSKLASGVPSRFSGSGSGTDYTLTISSLQPEDFATYYCQQ |
| | | | WSSNPQYTFGQGTKLEIK |
| SEQ ID NO: 3194 | VL | D- | DIQLTQSPSSLSASVGDRVTITCSVSSSVSYMHWYQQKPGKAPK |
| | | H.10 | LLIYDTSKLASGVPSRFSGSGSGTDYTFTISSLQPEDIATYYCQQ |
| | | | WSSNPQYTFGQGTKLEIK |
| SEQ ID NO: 3195 | VL | D- | EIVLTQSPATLSLSPGERATLSCSVSSSVSYMHWYQQKPGQAPK |
| | | H.11 | LLIYDTSKLASGIPARFSGSGSGTDYTLTISSLEPEDFAVYYCQQ |
| | | | WSSNPQYTFGQGTKLEIK |
| SEQ ID NO: 3196 | VL | D- | DIQLTQSPSTLSASVGDRVTITCSVSSSVSYMHWYQQKPGKAPK |
| | | H.12 | LLIYDTSKLASGVPSRFSGSGSGTEYTLTISSLQPDDFATYYCQQ |
| | | | WSSNPQYTFGQGTKLEIK |
| SEQ ID NO: 3197 | VL | D- | DIQLTQSPSSLSASVGDRVTITCSVSSSVSYMHWYQQKPGKTPK |
| | | H.13 | LLIYDTSKLASGIPSRFSGSGSGTDYTLTIRSLQPEDFATYYCQQ |
| | | | WSSNPQYTFGQGTKLEIK |
| SEQ ID NO: 3198 | VL | D- | EIVLTQSPPTLSLSPGERVTLSCSVSSSVSYMHWYQQKPGQAPKL |
| | | H.14 | LIYDTSKLASGIPARFSGSGSGTDYTLTISSLQPEDFAVYYCQQW |
| | | | SSNPQYTFGQGTKLEIK |
| SEQ ID NO: 3199 | VL | D- | DIQLTQSPSSLSASVGDRVTITCSVSSSVSYMHWYQQKPGKAPK |
| | | H.15 | RLIYDTSKLASGVPSRFSGSGSGTEYTLTISSLQPEDFATYYCQQ |
| | | | WSSNPQYTFGQGTKLEIK |
| SEQ ID NO: 3200 | VL | D- | EIVLTQSPATLSLSPGERATLSCSVSSSVSYMHWYQQKPGQAPK |
| | | H.16 | LLIYDTSKLASGIPARFSGSGPGTDYTLTISSLEPEDFAVYYCQQ |
| | | | WSSNPQYTFGQGTKLEIK |
| SEQ ID NO: 3201 | VL | D- | EIVLTQSPATLSLSPGERATLSCSVSSSVSYMHWYQQKPGQAPK |
| | | H.17 | LLIYDTSKLASGIPARFSGSGSGTDYTLTISRLEPEDFAVYYCQQ |
| | | | WSSNPQYTFGQGTKLEIK |
| SEQ ID NO: 3202 | VL | D- | EIVLTQSPATLSLSPGERATLSCSVSSSVSYMHWYQQKPGQAPK |
| | | H.18 | LLIYDTSKLASGIPARFSGSGSGTDYTLTISSLQPEDFAVYYCQQ |
| | | | WSSNPQYTFGQGTKLEIK |
| SEQ ID NO: 3203 | VL | D- | EIVLTQSPATLSVSPGERATLSCSVSSSVSYMHWYQQKPGQAPK |
| | | H.19 | LLIYDTSKLASGIPARFSGSGSGTEYTLTISSLQSEDFAVYYCQQ |
| | | | WSSNPQYTFGQGTKLEIK |
| SEQ ID NO: 3204 | VL | D- | EIVLTQSPATLSVSPGERATLSCSVSSSVSYMHWYQQKPGQAPK |
| | | H.20 | LLIYDTSKLASGIPARFSGSGSGTEYTLTISILQSEDFAVYYCQQW |
| | | | SSNPQYTFGQGTKLEIK |
| SEQ ID NO: 3205 | VL | D- | EIVLTQSPPTLSLSPGERVTLSCSVSSSVSYMHWYQQKPGQAPKL |
| | | H.21 | LIYDTSKLASSIPARFSGSGSGTDYTLTISSLQPEDFAVYYCQQWS |
| | | | SNPQYTFGQGTKLEIK |
| SEQ ID NO: 3206 | VL | D- | DIQLTQSPSSLSASVGDRVTITCSVSSSVSYMHWYQQKPGKAPK |
| | | H.22 | SLIYDTSKLASGVPSRFSGSGSGTDYTLTISSLQPEDFATYYCQQ |
| | | | WSSNPQYTFGQGTKLEIK |
| SEQ ID NO: 3207 | VL | D- | DIQLTQSPSSLSASVGDRVTITCSVSSSVSYMHWYQQKPGKAPK |
| | | H.23 | RLIYDTSKLASGVPSRFSGSGSGTEYTLTISNLQPEDFATYYCQQ |
| | | | WSSNPQYTFGQGTKLEIK |
| SEQ ID NO: 3208 | VL | D- | DIQLTQSPSAMSASVGDRVTITCSVSSSVSYMHWYQQKPGKVPK |
| | | H.24 | RLIYDTSKLASGVPSRFSGSGSGTEYTLTISSLQPEDFATYYCQQ |
| | | | WSSNPQYTFGQGTKLEIK |
| SEQ ID NO: 3209 | VL | D- | EIVLTQSPATLSLSPGERATLSCSVSSSVSYMHWYQQKPGQAPK |
| | | H.25 | LLIYDTSKLASGIPDRFSGSGSGTDYTLTISRLEPEDFAVYYCQQ |
| | | | WSSNPQYTFGQGTKLEIK |
| SEQ ID NO: 3210 | VL | D- | EIVLTQSPATLSLSPGERATLSCSVSSSVSYMHWYQQKPGLAPKL |
| | | H.26 | LIYDTSKLASGIPDRFSGSGSGTDYTLTISRLEPEDFAVYYCQQW |
| | | | SSNPQYTFGQGTKLEIK |
| SEQ ID NO: 3211 | VL | D- | EIVLTQSPGTLSLSPGERATLSCSVSSSVSYMHWYQQKPGQAPK |
| | | H.27 | LLIYDTSKLASGIPDRFSGSGSGTDYTLTISRLEPEDFAVYYCQQ |
| | | | WSSNPQYTFGQGTKLEIK |
| SEQ ID NO: 3212 | VL | D- | DIQLTQSPSSLSASVGDRVTITCSVSSSVSYMHWYQQKPGKAPK |
| | | H.28 | SLIYDTSKLASGVPSKFSGSGSGTDYTLTISSLQPEDFATYYCQQ |
| | | | WSSNPQYTFGQGTKLEIK |
| SEQ ID NO: 3213 | VL | D- | DIQLTQSPSSLSASVGDRVTITCSVSSSVSYMHWYQQKPEKAPKS |
| | | H.29 | LIYDTSKLASGVPSRFSGSGSGTDYTLTISSLQPEDFATYYCQQW |
| | | | SSNPQYTFGQGTKLEIK |
| SEQ ID NO: 3214 | VL | D- | DIVLTQSPDSLAVSLGERATINCSVSSSVSYMHWYQQKPGQPPK |
| | | H.30 | LLIYDTSKLASGVPDRFSGSGSGTDYTLTISSLQAEDVAVYYCQQ |
| | | | WSSNPQYTFGQGTKLEIK |
| SEQ ID NO: 3215 | VL | D- | EIVLTQTPLSLSITPGEQASMSCSVSSSVSYMHWYLQKARPVPKL |
| | | H.31 | LIYDTSKLASGVPDRFSGSGSGTDYTLKISRVEAEDFGVYYCQQ |
| | | | WSSNPQYTFGQGTKLEIK |
| SEQ ID NO: 3216 | VL | D- | EIVLTQTPLSLSITPGEQASISCSVSSSVSYMHWYLQKARPVPKLL |
| | | H.32 | IYDTSKLASGVPDRFSGSGSGTDYTLKISRVEAEDFGVYYCQQW |
| | | | SSNPQYTFGQGTKLEIK |
| SEQ ID NO: 3217 | VL | D- | DIVLTQSPLSLPVTPGEPASISCSVSSSVSYMHWYLQKPGQSPKL |
| | | H.33 | LIYDTSKLASGVPDRFSGSGSGTDYTLKISRVEAEDVGVYYCQQ |
| | | | WSSNPQYTFGQGTKLEIK |
| SEQ ID NO: 3218 | VL | D- | DIVLTQSPLSLPVTLGQPASISCSVSSSVSYMHWYQQRPGQSPKR |
| | | H.34 | LIYDTSKLASGVPDRFSGSGSGTDYTLKISRVEAEDVGVYYCQQ |
| | | | WSSNPQYTFGQGTKLEIK |
| SEQ ID NO: 3219 | VL | D- | DIVLTQTPLSLPVTPGEPASISCSVSSSVSYMHWYLQKPGQSPKL |
| | | H.35 | LIYDTSKLASGVPDRFSGSGSGTDYTLKISRVEAEDVGVYYCQQ |
| | | | WSSNPQYTFGQGTKLEIK |
| SEQ ID NO: 3220 | VL | D- | DIVLTQTPLSLSVTPGQPASISCSVSSSVSYMHWYLQKPGQSPKL |
| | | H.36 | LIYDTSKLASGVPDRFSGSGSGTDYTLKISRVEAEDVGVYYCQQ |
| | | | WSSNPQYTFGQGTKLEIK |
| SEQ ID NO: 3221 | VL | D- | DIVLTQTPLSLSVTPGQPASISCSVSSSVSYMHWYLQKPGQPPKL |
| | | H.37 | LIYDTSKLASGVPDRFSGSGSGTDYTLKISRVEAEDVGVYYCQQ |
| | | | WSSNPQYTFGQGTKLEIK |
| SEQ ID NO: 3222 | VL | D- | DIQLIQSPSFLSASVGDRVSIICSVSSSVSYMHWYLQKPGKSPKLF |
| | | H.38 | IYDTSKLASGVSSRFSGRGSGTDYTLTIISLKPEDFAAYYCQQWS |
| | | | SNPQYTFGQGTKLEIK |
| SEQ ID NO: 3223 | VL | D- | DIVLTQTPLSSPVTLGQPASISCSVSSSVSYMHWYQQRPGQPPKL |
| | | H.39 | LIYDTSKLASGVPDRFSGSGAGTDYTLKISRVEAEDVGVYYCQQ |
| | | | WSSNPQYTFGQGTKLEIK |
| SEQ ID NO: 3224 | VL | D- | EITLTQSPAFMSATPGDKVNISCSVSSSVSYMHWYQQKPGEAPK |
| | | H.40 | FIIYDTSKLASGIPPRFSGSGYGTDYTLTINNIESEDAAYYYCQQW |
| | | | SSNPQYTFGQGTKLEIK |

Variable HEAVY chain (VH)

| | | | |
|---|---|---|---|
| SEQ ID NO: 3225 | VH | D-H.1 | EVQLVESGGGLVKPGGSLRLSCAVSGFTFRSYGMSWVRQAPGK |
| | | | GLEWVALISSGGSYTYYTDSVKGRFTISRDNSKNTLYLQMNSLK |
| | | | TEDTAVYYCSRHGGNFFDYWGQGTTVTVSS |
| SEQ ID NO: 3226 | VH | D-H.2 | EVQLVESGGALVKPGGSLRLSCAVSGFTFRSYGMSWVRQAPGK |
| | | | GLEWVALISSGGSYTYYTDSVKGRFTISRDNSKNTLYLQMNSLK |
| | | | TEDTAVYYCSRHGGNFFDYWGQGTTVTVSS |
| SEQ ID NO: 3227 | VH | D-H.3 | EVQLVESGGGLVQPGGSLRLSCAVSGFTFRSYGMSWVRQAPGK |
| | | | GLEWVALISSGGSYTYYTDSVKGRFTISRDNAKNTLYLQMNSLR |
| | | | AEDTAVYYCSRHGGNFFDYWGQGTTVTVSS |
| SEQ ID NO: 3228 | VH | D-H.4 | EVQLVESGGGLVQPGGSLRLSCAVSGFTFRSYGMSWVRQAPGK |
| | | | GLEWVALISSGGSYTYYTDSVKGRFTISRDNAKNSLYLQMNSLR |
| | | | AEDTAVYYCSRHGGNFFDYWGQGTTVTVSS |
| SEQ ID NO: 3229 | VH | D-H.5 | EVQLVESGGGLVQPGGSLRLSCAVSGFTFRSYGMSWVRQAPGK |
| | | | GLEWVALISSGGSYTYYTDSVKGRFTISRDNSKNSLYLQMNSLK |
| | | | TEDTAVYYCSRHGGNFFDYWGQGTTVTVSS |
| SEQ ID NO: 3230 | VH | D-H.6 | EVQLVESGGGLVQPGGSLRLSCAVSGFTFRSYGMSWVRQAPGK |
| | | | GLEWVALISSGGSYTYYTDSVKGRFTISRDNAKNSLYLQMNSLR |
| | | | AEDMAVYYCSRHGGNFFDYWGQGTTVTVSS |
| SEQ ID NO: 3231 | VH | D-H.7 | EVQLVESGGGLVQPGGSLRLSCAVSGFTFRSYGMSWVRQAPGK |
| | | | GLEWVALISSGGSYTYYTDSVKGQFTISRDNAKNTLYLQMNSLR |
| | | | AEDMAVYYCSRHGGNFFDYWGQGTTVTVSS |
| SEQ ID NO: 3232 | VH | D-H.8 | EVQLVESGGGLVKPGRSLRLSCTVSGFTFRSYGMSWVRQAPGK |
| | | | GLEWVALISSGGSYTYYTDSVKGRFTISRDNSKNILYLQMNSLK |
| | | | TEDTAVYYCSRHGGNFFDYWGQGTTVTVSS |
| SEQ ID NO: 3233 | VH | D-H.9 | EVQLVESGGGLVKPGGSLRLSCAVSGFTFRSYGMSWVRQAPGK |
| | | | GLEWVALISSGGSYTYYTDSVKGRFTISRDNAKNSLYLQMNSLR |
| | | | AEDTAVYYCSRHGGNFFDYWGQGTTVTVSS |
| SEQ ID NO: 3234 | VH | D- | EVQLVESGGGLVQPGGSLKLSCAVSGFTFRSYGMSWVRQASGK |
| | | H.10 | GLEWVALISSGGSYTYYTDSVKGRFTISRDNSKNTLYLQMNSLK |
| | | | TEDTAVYYCSRHGGNFFDYWGQGTTVTVSS |
| SEQ ID NO: 3235 | VH | D- | QVQLVESGGGVVQPGGSLRLSCAVSGFTFRSYGMSWVRQAPGK |
| | | H.11 | GLEWVALISSGGSYTYYTDSVKGRFTISRDNSKNTLYLQMNSLR |
| | | | AEDTAVYYCSRHGGNFFDYWGQGTTVTVSS |
| SEQ ID NO: 3236 | VH | D- | QVQLVESGGGVVQPGRSLRLSCAVSGFTFRSYGMSWVRQAPGK |
| | | H.12 | GLEWVALISSGGSYTYYTDSVKGRFTISRDNSKNTLYLQMSSLR |
| | | | AEDTAVYYCSRHGGNFFDYWGQGTTVTVSS |
| SEQ ID NO: 3237 | VH | D- | EVQLVESGGGLVQPGGSLRLSCPVSGFTFRSYGMSWVRQAPGK |
| | | H.13 | GLEWVALISSGGSYTYYTDSVKGRFTISRDNANNSLYLQMNSLR |
| | | | AEDTAVYYCSRHGGNFFDYWGQGTTVTVSS |
| SEQ ID NO: 3238 | VH | D- | EVQLVESGGGLVQPGRSLRLSCTVSGFTFRSYGMSWVRQAPGK |
| | | H.14 | GLEWVALISSGGSYTYYTDSVKGRFTISRDNSKNILYLQMNSLK |
| | | | TEDTAVYYCSRHGGNFFDYWGQGTTVTVSS |
| SEQ ID NO: 3239 | VH | D- | EVQLVESGGGLVQPGPSLRLSCTVSGFTFRSYGMSWVRQAPGK |
| | | H.15 | GLEWVALISSGGSYTYYTDSVKGRFTISRDNSKNILYLQMNSLK |
| | | | TEDTAVYYCSRHGGNFFDYWGQGTTVTVSS |
| SEQ ID NO: 3240 | VH | D- | EVQLVESGGGLVQPGGSLRLSCAVSGFTFRSYGMSWVRQAPGK |
| | | H.16 | GLEWVALISSGGSYTYYTDSVKGRFTISRDNSKNTLYLQMNSLR |
| | | | AEDTAVYYCSRHGGNFFDYWGQGTTVTVSS |
| SEQ ID NO: 3241 | VH | D- | EVQLVESGGGLVQPGGSLRLSCAVSGFTFRSYGMSWVRQAPGK |
| | | H.17 | GLEWVALISSGGSYTYYTDSVKGRFTISRDNAKNSLYLQMNSLR |
| | | | DEDTAVYYCSRHGGNFFDYWGQGTTVTVSS |
| SEQ ID NO: 3242 | VH | D- | QVQLVESGGGLVKPGGSLRLSCAVSGFTFRSYGMSWVRQAPGK |
| | | H.18 | GLEWVALISSGGSYTYYTDSVKGRFTISRDNAKNSLYLQMNSLR |
| | | | AEDTAVYYCSRHGGNFFDYWGQGTTVTVSS |
| SEQ ID NO: 3243 | VH | D- | QVQLVESGGGVVQPGRSLRLSCAVSGFTFRSYGMSWVRQAPGK |
| | | H.19 | GLEWVALISSGGSYTYYTDSVKGRFTISRDNSKNTLYLQMNSLR |
| | | | AEDTAVYYCSRHGGNFFDYWGQGTTVTVSS |
| SEQ ID NO: 3244 | VH | D- | EVQLLESGGGLVQPGGSLRLSCAVSGFTFRSYGMSWVRQAPGK |
| | | H.20 | GLEWVALISSGGSYTYYTDSVKGRFTISRDNSKNTLYLQMNSLR |
| | | | AEDTAVYYCSRHGGNFFDYWGQGTTVTVSS |
| SEQ ID NO: 3245 | VH | D- | EVQLVESGGGLVQPGGSLRLSCAVSGFTFRSYGMSWVRQAPGK |
| | | H.21 | GLEWVALISSGGSYTYYTDSVKGRFTISRHNSKNTLYLQMNSLR |
| | | | AEDTAVYYCSRHGGNFFDYWGQGTTVTVSS |
| SEQ ID NO: 3246 | VH | D- | EVQLVESGGGLIQPGGSLRLSCAVSGFTFRSYGMSWVRQPPGKG |
| | | H.22 | LEWVALISSGGSYTYYTDSVKGRFTISRDNSKNTLYLQMNSLRA |
| | | | EDTAVYYCSRHGGNFFDYWGQGTTVTVSS |
| SEQ ID NO: 3247 | VH | D- | EVQLVESGGGLIQPGGSLRLSCAVSGFTFRSYGMSWVRQAPGK |
| | | H.23 | GLEWVALISSGGSYTYYTDSVKGRFTISRDNSKNTLYLQMNSLR |
| | | | AEDTAVYYCSRHGGNFFDYWGQGTTVTVSS |
| SEQ ID NO: 3248 | VH | D- | EVQLVESGGGLVQPGRSLRLSCAVSGFTFRSYGMSWVRQAPGK |
| | | H.24 | GLEWVALISSGGSYTYYTDSVKGRFTISRDNAKNSLYLQMNSLR |
| | | | AEDTALYYCSRHGGNFFDYWGQGTTVTVSS |
| SEQ ID NO: 3249 | VH | D- | QVQLVESGGGVVQPGRSLRLSCAVSGFTFRSYGMSWVRQAPGK |
| | | H.25 | GLEWVALISSGGSYTYYTDSVKGRFTISRDNSKNRLYLQMNSLR |
| | | | AEDTAVYYCSRHGGNFFDYWGQGTTVTVSS |
| SEQ ID NO: 3250 | VH | D- | QVQLVESGGGVVQPGRSLRLSCAVSGFTFRSYGMSWVRQAPGK |
| | | H.26 | GLEWVALISSGGSYTYYTDSVKGRFTISRDNSKNTLYLQMNSLR |
| | | | AEGTAVYYCSRHGGNFFDYWGQGTTVTVSS |
| SEQ ID NO: 3251 | VH | D- | QVQLVESGGGVVQPGRSLRLSCAVSGFTFRSYGMSWVRQAPGK |
| | | H.27 | GLEWVALISSGGSYTYYTDSVKGRFAISRDNSKNTLYLQMNSLR |
| | | | AEDTAVYYCSRHGGNFFDYWGQGTTVTVSS |
| SEQ ID NO: 3252 | VH | D- | QVQLVDSGGGVVQPGRSLRLSCAVSGFTFRSYGMSWVRQAPG |
| | | H.28 | KGLEWVALISSGGSYTYYTDSVKGRFTISRDNSKNTLYLQMNSL |
| | | | RAEDTAVYYCSRHGGNFFDYWGQGTTVTVSS |
| SEQ ID NO: 3253 | VH | D- | EVQLVESGGGVVRPGGSLRLSCAVSGFTFRSYGMSWVRQAPGK |
| | | H.29 | GLEWVALISSGGSYTYYTDSVKGRFTISRDNAKNSLYLQMNSLR |
| | | | AEDTALYHCSRHGGNFFDYWGQGTTVTVSS |
| SEQ ID NO: 3254 | VH | D- | EVQLVESGGVVVQPGGSLRLSCAVSGFTFRSYGMSWVRQAPGK |
| | | H.30 | GLEWVALISSGGSYTYYTDSVKGRFTISRDNSKNSLYLQMNSLR |
| | | | AEDTALYYCSRHGGNFFDYWGQGTTVTVSS |
| SEQ ID NO: 3255 | VH | D- | EVQLVESGGGVVQPGGSLRLSCAVSGFTFRSYGMSWVRQAPGK |
| | | H.31 | GLEWVALISSGGSYTYYTDSVKGRFTISRDNSKNSLYLQMNSLR |
| | | | TEDTALYYCSRHGGNFFDYWGQGTTVTVSS |
| SEQ ID NO: 3256 | VH | D- | EVQLVESGGVVVQPGGSLRLSCAVSGFTFRSYGMSWVRQAPGK |
| | | H.32 | GLEWVALISSGGSYTYYTDSVKGRFTISRDNSKNSLYLQMNSLR |
| | | | TEDTALYYCSRHGGNFFDYWGQGTTVTVSS |
| SEQ ID NO: 3257 | VH | D- | EVQLVETGGGLIQPGGSLRLSCAVSGFTFRSYGMSWVRQAPGK |
| | | H.33 | GLEWVALISSGGSYTYYTDSVKGRFTISRDNSKNTLYLQMNSLR |
| | | | AEDTAVYYCSRHGGNFFDYWGQGTTVTVSS |
| SEQ ID NO: 3258 | VH | D- | EVQLVESGGGLVQPGGSLRLSCAVSGFTFRSYGMSWVRQATGK |
| | | H.34 | GLEWVALISSGGSYTYYTDSVKGRFTISRENAKNSLYLQMNSLR |
| | | | AGDTAVYYCSRHGGNFFDYWGQGTTVTVSS |
| SEQ ID NO: 3259 | VH | D- | EVQLVESRGVLVQPGGSLRLSCAVSGFTFRSYGMSWVRQAPGK |
| | | H.35 | GLEWVALISSGGSYTYYTDSVKGRFTISRDNSKNTLHLQMNSLR |
| | | | AEDTAVYYCSRHGGNFFDYWGQGTTVTVSS |
| SEQ ID NO: 3260 | VH | D- | EVQLVESGGGLVQPGRSLRLSCAVSGFTFRSYGMSWVRQAPGK |
| | | H.36 | GLEWVALISSGGSYTYYTDSVKGRFTISRDNAKNSLYLQMNSLR |
| | | | AEDMALYYCSRHGGNFFDYWGQGTTVTVSS |
| SEQ ID NO: 3261 | VH | D- | QVQLVESGGGLVQPGGSLRLSCSVSGFTFRSYGMSWVRQAPGK |
| | | H.37 | GLEWVALISSGGSYTYYTDSVKGRFTISRDNSKNTLYLQMNSLR |
| | | | AEDTAVYYCSRHGGNFFDYWGQGTTVTVSS |
| SEQ ID NO: 3262 | VH | D- | EVQLVESGGGLVQPGGSLRLSCSVSGFTFRSYGMSWVRQAPGK |
| | | H.38 | GLEWVALISSGGSYTYYTDSVKGRFTISRDNSKNTLYLQMSSLR |
| | | | AEDTAVYYCSRHGGNFFDYWGQGTTVTVSS |
| SEQ ID NO: 3263 | VH | D- | QVQLVESGGGVVQPGRSLRLSCAVSGFTFRSYGMSWVRQAPGK |
| | | H.39 | GLEWVALISSGGSYTYYTDSVKGRFTISRDNSTNTLFLQMNSLR |
| | | | AEDTAVYYCSRHGGNFFDYWGQGTTVTVSS |
| SEQ ID NO: 3264 | VH | D- | QVQLLESGGGLVKPGGSLRLSCAVSGFTFRSYGMSWVRQAPGK |
| | | H.40 | GLEWVALISSGGSYTYYTDSVKGRFTISRDNAKNSLYLQMNSLR |
| | | | AEDTAVYYCSRHGGNFFDYWGQGTTVTVSS |
| SEQ ID NO: 3265 | VH | D- | EVQLVESGEGLVQPGGSLRLSCAVSGFTFRSYGMSWVRQAPGK |
| | | H.41 | GLEWVALISSGGSYTYYTDSVKGRFTISRDNSKNTLYLQMGSLR |
| | | | AEDMAVYYCSRHGGNFFDYWGQGTTVTVSS |
| SEQ ID NO: 3266 | VH | D- | EVQLVESGGGLVQPGGSLRLSCAVSGFTFRSYGMSWVRQAPGK |
| | | H.42 | GLEWVALISSGGSYTYYTDSVKGRFTISRDNSKNTLYLQMGSLR |
| | | | AEDMAVYYCSRHGGNFFDYWGQGTTVTVSS |
| SEQ ID NO: 3267 | VH | D- | EVQLVESGGGLVQPGGSLRLSCSVSGFTFRSYGMSWVRQAPGK |
| | | H.43 | GLEWVALISSGGSYTYYTDSVKGRFTISRDNSKNTLYVQMSSLR |
| | | | AEDTAVYYCSRHGGNFFDYWGQGTTVTVSS |
| SEQ ID NO: 3268 | VH | D- | EVQLVESGGGLVQPGGSLRLSCAVSGFTFRSYGMSWVRQAPGK |
| | | H.44 | GLEWVALISSGGSYTYYTDSVKGRFIISRDNSRNSLYLQKNRRR |
| | | | AEDMAVYYCSRHGGNFFDYWGQGTTVTVSS |
| SEQ ID NO: 3269 | VH | D- | EVQLVESGGGLVQPGGSLRLSCAVSGFTFRSYGMSWVHQAPGK |
| | | H.45 | GLEWVALISSGGSYTYYTDSVKGRFIISRDNSRNTLYLQTNSLRA |
| | | | EDTAVYYCSRHGGNFFDYWGQGTTVTVSS |
| SEQ ID NO: 3270 | VH | D- | EVHLVESGGGLVQPGGALRLSCAVSGFTFRSYGMSWVRQATGK |
| | | H.46 | GLEWVALISSGGSYTYYTDSVKGRFTISRENAKNSLYLQMNSLR |
| | | | AGDTAVYYCSRHGGNFFDYWGQGTTVTVSS |
| SEQ ID NO: 3271 | VH | D- | EVQLVESGGGLVQPRGSLRLSCAVSGFTFRSYGMSWVRQAPGK |
| | | H.47 | GLEWVALISSGGSYTYYTDSVKGRFTISRDNSKNTLYLQMNNLR |
| | | | AEGTAVYYCSRHGGNFFDYWGQGTTVTVSS |
| SEQ ID NO: 3272 | VH | D- | EVQLVESGGGLVQPRGSLRLSCAVSGFTFRSYGMSWVRQAPGK |
| | | H.48 | GLEWVALISSGGSYTYYTDSVKGRFTISRDNSKNTLYLQMNNLR |
| | | | AEGTAAYYCSRHGGNFFDYWGQGTTVTVSS |
| SEQ ID NO: 3273 | VH | D- | QVQLVQSGAEVKKPGASVKVSCKVSGFTFRSYGMSWVRQAPG |
| | | H.49 | KGLEWVALISSGGSYTYYTDSVKGRFTITRDNSTNTLYMELSSL |
| | | | RSEDTAVYYCSRHGGNFFDYWGQGTTVTVSS |
| SEQ ID NO: 3274 | VH | D- | QVQLVQSGSELKKPGASVKVSCKVSGFTFRSYGMSWVRQAPGQ |
| | | H.50 | GLEWVALISSGGSYTYYTDSVKGRFVISRDNSVNTLYLQISSLKA |
| | | | EDTAVYYCSRHGGNFFDYWGQGTTVTVSS |

TABLE 13
Amino acid sequences for additional anti-TCRβ V antibodies. Amino acid and nucleotide
sequences for murine and humanized antibody molecules which bind to various TCRVB families are
disclosed. The amino acid the heavy and light chain CDRs, and the amino acid and nucleotide
sequences of the heavy and light chain variable regions, and the heavy and light chains are
shown. Antibodies disclosed in the table include, MPB2D5, CAS1.1.3, IMMU222, REA1062, and
JOVI-3. MPB2D5 binds human TCRβV 20-1 (TCRβV2 per old nomenclature). CAS1.1.3 binds human TCRβV
27 (TCRβV14 per old nomenclature). IMMU 222 binds human TCRβV 6-5, TCRβV 6-6, or TCRβV 6-9
(TCRβV13.1 per old nomenclature). REA1062 binds human TCRβV 5-1). JOVI-3 binds human TCRβV 28
(TCRßV3.1 per old nomenclature). IMMU546 binds human TCRβV 2.
MPB2D5 (murine), also referred to here as BJ1188, BJ1190 and REA654; or Antibody G
Binds to human TCRVβ 20-1

| | | |
|---|---|---|
| SEQ ID NO: 1102 | HC CDR1 (Kabat) | SAYMH |
| SEQ ID NO: 1103 | HC CDR2 (Kabat) | RIDPATGKTKYAPKFQA |
| SEQ ID NO: 1104 | HC CDR3 (Kabat) | SLNWDYGLDY |
| SEQ ID NO: 1105 | HC CDR1 (Chothia) | GFNIKSA |
| SEQ ID NO: 1106 | HC CDR2 (Chothia) | DPATGK |
| SEQ ID NO: 1104 | HC CDR3 (Chothia) | SLNWDYGLDY |
| SEQ ID NO: 3640 | HC CDR1 (Combined) | GFNIKSAYMH |
| SEQ ID NO: 1103 | HC CDR2 (Combined) | RIDPATGKTKYAPKFQA |
| SEQ ID NO: 1104 | HC CDR3 (Combined) | SLNWDYGLDY |
| SEQ ID NO: 1107 | LC CDR1 (Kabat) | RASKSVSILGTHLIH |
| SEQ ID NO: 1108 | LC CDR2 (Kabat) | AASNLES |
| SEQ ID NO: 1109 | LC CDR3 (Kabat) | QQSIEDPWT |
| SEQ ID NO: 1110 | LC CDR1 (Chothia) | SKSVSILGTHL |
| SEQ ID NO: 1108 | LC CDR2 (Chothia) | AASNLES |
| SEQ ID NO: 1109 | LC CDR3 (Chothia) | QQSIEDPWT |
| SEQ ID NO: 1107 | LC CDR1 (Combined) | RASKSVSILGTHLIH |
| SEQ ID NO: 1108 | LC CDR2 (Combined) | AASNLES |
| SEQ ID NO: 1109 | LC CDR3 (Combined) | QQSIEDPWT |
| SEQ ID NO: 1111 | VL | DIVLTQSPASLAVSLGQRATISCRASKSVSILGTHLIHWYQQKP |
| | | GQPPKLLIYAASNLESGVPARFSGSGSETVFTLNIHPVEEEDAA |
| | | TYFCQQSIEDPWTFGGGTKLGIK |
| SEQ ID NO: 1112 | VH | EVQLQQSVADLVRPGASLKLSCTASGFNIKSAYMHWVIQRPD |
| | | QGPECLGRIDPATGKTKYAPKFQAKATITADTSSNTAYLQLSS |
| | | LTSEDTAIYYCTRSLNWDYGLDYWGQGTSVTVSS |

VH for MPB2D5 (humanized) also referred to as Antibody G-H (humanized)
Binds to human TCRVβ 20-1

| | | |
|---|---|---|
| SEQ ID NO: 1113 | VH-1 | QVQLVQSGAEVKKPGASVKVSCKASGFNIKSAYMHWVRQAP |
| | | GQGLEWMGRIDPATGKTKYAPKFQARVTMTADTSTNTAYME |
| | | LSSLRSEDTAVYYCARSLNWDYGLDYWGQGTLVTVSS |
| SEQ ID NO: 1114 | VH-2 | QVQLVQSGAEVKKPGASVKVSCKASGFNIKSAYMHWVRQAP |
| | | GQEPGCMGRIDPATGKTKYAPKFQARVTMTADTSINTAYTEL |
| | | SSLRSEDTATYYCARSLNWDYGLDYWGQGTLVTVSS |
| SEQ ID NO: 1115 | VH-3 | QVQLVQSGAEVKKPGSSVKVSCKASGFNIKSAYMHWVRQAP |
| | | GQGLEWMGRIDPATGKTKYAPKFQARVTITADTSTNTAYMEL |
| | | SSLRSEDTAVYYCARSLNWDYGLDYWGQGTLVTVSS |
| SEQ ID NO: 1116 | VH-4 | QVQLVQSGAEVKKPGASVKVSCKASGFNIKSAYMHWVRQAP |
| | | GQRLEWMGRIDPATGKTKYAPKFQARVTITADTSANTAYMEL |
| | | SSLRSEDTAVYYCARSLNWDYGLDYWGQGTLVTVSS |

VL for MPB2D5 (humanized) also referred to as Antibody G-H (humanized)
Binds to human TCRVβ 20-1

| | | |
|---|---|---|
| SEQ ID NO: 1117 | VL-1 | EIVLTQSPATLSLSPGERATLSCRASKSVSILGTHLIHWYQQKP |
| | | GQAPRLLIYAASNLESGIPARFSGSGSETDFTLTISSLEPEDFAV |
| | | YFCQQSIEDPFGGGTKVEIK |
| SEQ ID NO: 1118 | VL-2 | EIVLTQSPATLSLSPGERATLSCRASKSVSILGTHLIHWYQQKP |
| | | GLAPRLLIYAASNLESGIPDRFSGSGSETDFTLTISRLEPEDFAV |
| | | YFCQQSIEDPFGGGTKVEIK |
| SEQ ID NO: 1119 | VL-3 | EIVLTQSPGTLSLSPGERATLSCRASKSVSILGTHLIHWYQQKP |
| | | GQAPRLLIYAASNLESGIPDRFSGSGSETDFTLTISRLEPEDFAV |
| | | YFCQQSIEDPFGGGTKVEIK |

CAS1.1.3 (murine) also referred to herein as BJ1460; or Antibody H
Binds to human TCRVβ 27

| | | |
|---|---|---|
| SEQ ID NO: 1120 | HC CDR1 (Kabat) | DTYMY |
| SEQ ID NO: 1121 | HC CDR2 (Kabat) | RIDPANGNTKYDPKFQD |
| SEQ ID NO: 1122 | HC CDR3 (Kabat) | GSYYYAMDY |
| SEQ ID NO: 1123 | HC CDR1 (Chothia) | GFKTEDT |
| SEQ ID NO: 1124 | HC CDR2 (Chothia) | DPANGN |
| SEQ ID NO: 1122 | HC CDR3 (Chothia) | GSYYYAMDY |
| SEQ ID NO: 1125 | HC CDR1 (Combined) | GFKTEDTYMY |
| SEQ ID NO: 1121 | HC CDR2 (Combined) | RIDPANGNTKYDPKFQD |
| SEQ ID NO: 1122 | HC CDR3 (Combined) | GSYYYAMDY |
| SEQ ID NO: 1126 | LC CDR1 (Kabat) | RASESVDSYGNSFMH |
| SEQ ID NO: 1127 | LC CDR2 (Kabat) | RASNLES |
| SEQ ID NO: 1128 | LC CDR3 (Kabat) | QQSNEDPYT |
| SEQ ID NO: 3641 | LC CDR1 (Chothia) | SESVDSYGNSF |
| SEQ ID NO: 1127 | LC CDR2 (Chothia) | RASNLES |
| SEQ ID NO: 1128 | LC CDR3 (Chothia) | QQSNEDPYT |
| SEQ ID NO: 1126 | LC CDR1 (Combined) | RASESVDSYGNSFMH |
| SEQ ID NO: 1127 | LC CDR2 (Combined) | RASNLES |
| SEQ ID NO: 1128 | LC CDR3 (Combined) | QQSNEDPYT |
| SEQ ID NO: 1129 | VL | DIVLTQSPASLAVSLGQRATISCRASESVDSYGNSFMHWYQQK |
| | | PGQPPKLLIYRASNLESGIPARFSGSGSRTDFTLTINPVEADDVA |
| | | TYYCQQSNEDPYTFGGGTKLEIK |
| SEQ ID NO: 1130 | VH | EVQLQQSGAELVKPGASVKLSCTASGFKTEDTYMYWVKQRP |
| | | EQGLEWIGRIDPANGNTKYDPKFQDKATITADSSSNTAYLQLS |
| | | SLPSEDTAVYYCARGSYYYAMDYWGQGTSVTVSS |

VH for CAS1.1.3 (humanized) also referred to as Antibody H-H (humanized)
Binds to human TCRVβ 27

| | | |
|---|---|---|
| SEQ ID NO: 1131 | VH-1 | QVQLVQSGAEVKKPGSSVKVSCKASGFKTEDTYMYWVRQAP |
| | | GQGLEWIGRIDPANGNTKYDPKFQDRATITADSSTNTAYMELS |
| | | SLRSEDTAVYYCARGSYYYAMDYWGQGTLVTVSS |
| SEQ ID NO: 1132 | VH-2 | QVQLVQSGAEVKKPGASVKVSCKASGFKTEDTYMYWVRQAP |
| | | GQRLEWIGRIDPANGNTKYDPKFQDRATITADSSANTAYMELS |
| | | SLRSEDTAVYYCARGSYYYAMDYWGQGTLVTVSS |
| SEQ ID NO: 1133 | VH-3 | EVQLVESGGGLVQPGGSLKLSCAASGFKTEDTYMYWVRQAS |
| | | GKGLEWIGRIDPANGNTKYDPKFQDRATISADSSKNTAYLQM |
| | | NSLKTEDTAVYYCARGSYYYAMDYWGQGTLVTVSS |
| SEQ ID NO: 1134 | VH-4 | EVQLVQSGAEVKKPGESLRISCKASGFKTEDTYMYWVRQMPG |
| | | KGLEWIGRIDPANGNTKYDPKFQDQATISADSSINTAYLQWSS |
| | | LKASDTAMYYCARGSYYYAMDYWGQGTLVTVSS |
| SEQ ID NO: 1135 | VH-5 | QVQLVQSGSELKKPGASVKVSCKASGFKTEDTYMYWVRQAP |
| | | GQGLEWIGRIDPANGNTKYDPKFQDRAVISADSSVNTAYLQIS |
| | | SLKAEDTAVYYCARGSYYYAMDYWGQGTLVTVSS |

VL for CAS1.1.3 (humanized) also referred to as Antibody H-H (humanized)
Binds to human TCRVβ 27

| | | |
|---|---|---|
| SEQ ID NO: 1136 | VL-1 | DIVLTQSPDSLAVSLGERATINCRASESVDSYGNSFMHWYQQK |
| | | PGQPPKLLIYRASNLESGVPDRFSGSGSRTDFTLTISSLQAEDVA |
| | | VYYCQQSNEDPYTFGQGTKLEIK |
| SEQ ID NO: 1137 | VL-2 | EIVLTQSPATLSLSPGERATLSCRASESVDSYGNSFMHWYQQK |
| | | PGQAPKLLIYRASNLESGIPARFSGSGSRTDFTLTISRLEPEDFA |
| | | VYYCQQSNEDPYTFGQGTKLEIK |
| SEQ ID NO: 1138 | VL-3 | DIQLTQSPSSLSASVGDRVTITCRASESVDSYGNSFMHWYQQK |
| | | PGQAPKLLIYRASNLESGVPSRFSGSGSRTDFTLTISSLQPEDVA |
| | | TYYCQQSNEDPYTFGQGTKLEIK |
| SEQ ID NO: 1139 | VL-4 | AIQLTQSPSSLSASVGDRVTITCRASESVDSYGNSFMHWYQQK |
| | | PGKAPKLLIYRASNLESGVPSRFSGSGSRTDFTLTISSLQPEDFA |
| | | TYYCQQSNEDPYTFGQGTKLEIK |
| SEQ ID NO: 1140 | VL-5 | EIVLTQSPDFQSVTPKEKVTITCRASESVDSYGNSFMHWYQQK |
| | | PDQSPKLLIYRASNLESGVPSRFSGSGSRTDFTLTINSLEAEDAA |
| | | TYYCQQSNEDPYTFGQGTKLEIK |

IMMU222 (murine) also referred to as BJ1461; or Antibody I
Binds to human TCRVβ 6-5,6-6,6-9

| | | |
|---|---|---|
| SEQ ID NO: 1141 | HC CDR1 (Kabat) | SYAMS |
| SEQ ID NO: 1142 | HC CDR2 (Kabat) | HISNGGDYIYYADTVKG |
| SEQ ID NO: 1143 | HC CDR3 (Kabat) | PSYYSDPWFFDV |
| SEQ ID NO: 1144 | HC CDR1 (Chothia) | GFTFRSY |
| SEQ ID NO: 1145 | HC CDR2 (Chothia) | SNGGDY |
| SEQ ID NO: 1143 | HC CDR3 (Chothia) | PSYYSDPWFFDV |
| SEQ ID NO: 1146 | HC CDR1 (Combined) | GFTFRSYAMS |
| SEQ ID NO: 1142 | HC CDR2 (Combined) | HISNGGDYIYYADTVKG |
| SEQ ID NO: 1143 | HC CDR3 (Combined) | PSYYSDPWFFDV |
| SEQ ID NO: 1147 | LC CDR1 (Kabat) | SAGSSVSFMH |
| SEQ ID NO: 1148 | LC CDR2 (Kabat) | DTSKLAS |
| SEQ ID NO: 1149 | LC CDR3 (Kabat) | LQGSGFPLT |
| SEQ ID NO: 1150 | LC CDR1 (Chothia) | GSSVSF |
| SEQ ID NO: 1148 | LC CDR2 (Chothia) | DTSKLAS |
| SEQ ID NO: 1149 | LC CDR3 (Chothia) | LQGSGFPLT |
| SEQ ID NO: 1147 | LC CDR1 (Combined) | SAGSSVSFMH |
| SEQ ID NO: 1148 | LC CDR2 (Combined) | DTSKLAS |
| SEQ ID NO: 1149 | LC CDR3 (Combined) | LQGSGFPLT |
| SEQ ID NO: 1151 | VL | ENVLTQSPAIMSASPGEKVTMTCSAGSSVSFMHWYQQKSSTSP |
| | | KLWIYDTSKLASGVPGRFSGSGSGNSFSLTISSMEAEDVAIYYC |
| | | LQGSGFPLTFGSGTKLEIK |
| SEQ ID NO: 1152 | VH | DVKLVESGEGLVKPGGSLKLSCAASGFTFRSYAMSWVRQTPE |
| | | KRLEWVAHISNGGDYIYYADTVKGRFTISRDNARNTLYLQMS |
| | | SLKSEDTAMYYCTRPSYYSDPWFFDVWGTGTTVTVSS |

VH for IMMU222 (humanized) also referred to as Antibody I-H
Binds to human TCRVβ 6-5,6-6,6-9

| | | |
|---|---|---|
| SEQ ID NO: 1153 | VH-1 | EVQLVESGGGLVQPGGSLRLSCAASGFTFRSYAMSWVRQAPG |
| | | KGLEWVAHISNGGDYIYYADTVKGRFTISRDNAKNSLYLQMN |
| | | SLRAEDTAVYYCTRPSYYSDPWFFDVWGQGTTVTVSS |
| SEQ ID NO: 1154 | VH-2 | QVQLVESGGGVVQPGRSLRLSCAASGFTFRSYAMSWVRQAPG |
| | | KGLEWVAHISNGGDYIYYADTVKGRFTISRDNSKNTLYLQMS |
| | | SLRAEDTAVYYCTRPSYYSDPWFFDVWGQGTTVTVSS |
| SEQ ID NO: 1155 | VH-3 | EVQLVESGGGLVQPGGSLRLSCAASGFTFRSYAMSWVRQAPG |
| | | KGLEWVAHISNGGDYIYYADTVKGRFTISRDNSKNTLYLQMN |
| | | SLRAEDTAVYYCTRPSYYSDPWFFDVWGQGTTVTVSS |
| SEQ ID NO: 1156 | VH-4 | QVQLVQSGSELKKPGASVKVSCKASGFTFRSYAMSWVRQAPG |
| | | QGLEWVAHISNGGDYIYYADTVKGRFVISRDNSVNTLYLQISS |
| | | LKAEDTAVYYCTRPSYYSDPWFFDVWGQGTTVTVSS |
| SEQ ID NO: 1157 | VH-5 | QVQLVQSGAEVKKPGASVKVSCKASGFTFRSYAMSWVRQAP |
| | | GQRLEWVAHISNGGDYIYYADTVKGRFTITRDNSANTLYMEL |
| | | SSLRSEDTAVYYCTRPSYYSDPWFFDVWGQGTTVTVSS |

VL for IMMU222 (humanized)) also referred to as Antibody I-H
Binds to human TCRVβ 6-5,6-6,6-9

| | | |
|---|---|---|
| SEQ ID NO: 1158 | VL-1 | ENVLTQSPATLSLSPGERATLSCSAGSSVSFMHWYQQKPGQAP |
| | | KLLIYDTSKLASGIPARFSGSGSGNDFTLTISSLEPEDFAVYYCL |
| | | QGSGFPLTFGQGTKLEIK |
| SEQ ID NO: 1159 | VL-2 | ENVLTQSPDFQSVTPKEKVTITCSAGSSVSFMHWYQQKPDQSP |
| | | KLLIYDTSKLASGVPSRFSGSGSGNDFTLTINSLEAEDAATYYC |
| | | LQGSGFPLTFGQGTKLEIK |
| SEQ ID NO: 1160 | VL-3 | DNQLTQSPSSLSASVGDRVTITCSAGSSVSFMHWYQQKPGKVP |
| | | KLLIYDTSKLASGVPSRFSGSGSGNDFTLTISSLQPEDVATYYC |
| | | LQGSGFPLTFGQGTKLEIK |
| SEQ ID NO: 1161 | VL-4 | ANQLTQSPSSLSASVGDRVTITCSAGSSVSFMHWYQQKPGKAP |
| | | KLLIYDTSKLASGVPSRFSGSGSGNDFTLTISSLQPEDFATYYCL |
| | | QGSGFPLTFGQGTKLEIK |
| SEQ ID NO: 1162 | VL-5 | DNVLTQSPDSLAVSLGERATINCSAGSSVSFMHWYQQKPGQPP |
| | | KLLIYDTSKLASGVPDRFSGSGSGNDFTLTISSLQAEDVAVYYC |
| | | LQGSGFPLTFGQGTKLEIK |

REA1062 (murine), also referred to as BJ1189 or as Antibody J
Binds to human TCRVβ 5-1

| | | |
|---|---|---|
| SEQ ID NO: 1163 | HC CDR1 (Kabat) | DYNIH |
| SEQ ID NO: 1164 | HC CDR2 (Kabat) | YINPYNGRTGYNQKFKA |
| SEQ ID NO: 1165 | HC CDR3 (Kabat) | WDGSSYFDY |
| SEQ ID NO: 1166 | HC CDR1 (Chothia) | GYTFTDYNIH |
| SEQ ID NO: 1167 | HC CDR2 (Chothia) | NPYNGR |
| SEQ ID NO: 1165 | HC CDR3 (Chothia) | WDGSSYFDY |
| SEQ ID NO: 1166 | HC CDR1 (Combined) | GYTFTDYNIH |
| SEQ ID NO: 1164 | HC CDR2 (Combined) | YINPYNGRTGYNQKFKA |
| SEQ ID NO: 1165 | HC CDR3 (Combined) | WDGSSYFDY |
| SEQ ID NO: 1168 | LC CDR1 (Kabat) | SASSSVSYMH |
| SEQ ID NO: 1169 | LC CDR2 (Kabat) | EISKLAS |
| SEQ ID NO: 1170 | LC CDR3 (Kabat) | QQWNYPLLT |
| SEQ ID NO: 1297 | LC CDR1 (Chothia) | SSSVSY |
| SEQ ID NO: 1169 | LC CDR2 (Chothia) | EISKLAS |
| SEQ ID NO: 1170 | LC CDR3 (Chothia) | QQWNYPLLT |
| SEQ ID NO: 1168 | LC CDR1 (Combined) | SASSSVSYMH |
| SEQ ID NO: 1169 | LC CDR2 (Combined) | EISKLAS |
| SEQ ID NO: 1170 | LC CDR3 (Combined) | QQWNYPLLT |
| SEQ ID NO: 1171 | VL | EIVLTQSPAITAASLGQKVTITCSASSSVSYMHWYQQKSGTSPK |
| | | PWIYEISKLASGVPARFSGSGSGTSYSLTISSMEAEDAAIYYCQ |
| | | QWNYPLLTFGAGTKLELK |
| SEQ ID NO: 1172 | VH | EVQLQQSGPVLVKPGASVRMSCKASGYTFTDYNIHWVKQSH |
| | | GRSLEWVGYINPYNGRTGYNQKFKAKATLTVDKSSSTAYMD |
| | | LRSLTSEDSAVYYCARWDGSSYFDYWGQGTTLTVSS |

VH for REA1062 (humanized) also referred to as Antibody J-H
Binds to human TCRVβ 5-1

| | | |
|---|---|---|
| SEQ ID NO: 1173 | VH-1 | QVQLVQSGAEVKKPGSSVKVSCKASGYTFTDYNIHWVRQAPG |
| | | QGLEWVGYINPYNGRTGYNQKFKARATLTVDKSTSTAYMELS |
| | | SLRSEDTAVYYCARWDGSSYFDYWGQGTTVTVSS |
| SEQ ID NO: 1174 | VH-2 | QVQLVQSGAEVKKPGASVKVSCKASGYTFTDYNIHWVRQAP |
| | | GQGLEWVGYINPYNGRTGYNQKFKARATLTVDKSTSTAYME |
| | | LRSLRSDDMAVYYCARWDGSSYFDYWGQGTTVTVSS |
| SEQ ID NO: 1175 | VH-3 | QVQLVQSGAEVKKPGASVKVSCKASGYTFTDYNIHWVRQAT |
| | | GQGLEWVGYINPYNGRTGYNQKFKARATLTVNKSISTAYMEL |
| | | SSLRSEDTAVYYCARWDGSSYFDYWGQGTTVTVSS |
| SEQ ID NO: 1176 | VH-4 | EVQLVESGGGLVQPGRSLRLSCTASGYTFTDYNIHWVRQAPG |
| | | KGLEWVGYINPYNGRTGYNQKFKARATLSVDKSKSIAYLQM |
| | | NSLKTEDTAVYYCARWDGSSYFDYWGQGTTVTVSS |
| SEQ ID NO: 1177 | VH-5 | QVQLVQSGSELKKPGASVKVSCKASGYTFTDYNIHWVRQAPG |
| | | QGLEWVGYINPYNGRTGYNQKFKARAVLSVDKSVSTAYLQIS |
| | | SLKAEDTAVYYCARWDGSSYFDYWGQGTTVTVSS |

VL for REA1062 (humanized) also referred to as Antibody J-H
Binds to human TCRVβ 5-1

| | | |
|---|---|---|
| SEQ ID NO: 1178 | VL-1 | EIVLTQSPATLSLSPGERATLSCSASSSVSYMHWYQQKPGQAP |
| | | KLLIYEISKLASGIPARFSGSGSGTDYTLTISSLEPEDFAVYYCQ |
| | | QWNYPLLTFGQGTKLEIK |
| SEQ ID NO: 1179 | VL-2 | EIVLTQSPATLSLSPGERATLSCSASSSVSYMHWYQQKPGQAP |
| | | KLLIYEISKLASGIPARFSGSGSGTDYTLTISRLEPEDFAVYYCQ |
| | | QWNYPLLTFGQGTKLEIK |
| SEQ ID NO: 1180 | VL-3 | EIVLTQSPDFQSVTPKEKVTITCSASSSVSYMHWYQQKPDQSP |
| | | KLLIYEISKLASGVPSRFSGSGSGTDYTLTINSLEAEDAATYYC |
| | | QQWNYPLLTFGQGTKLEIK |
| SEQ ID NO: 1181 | VL-4 | DIQLTQSPSFLSASVGDRVTITCSASSSVSYMHWYQQKPGKAP |
| | | KLLIYEISKLASGVPSRFSGSGSGTEYTLTISSLQPEDFATYYCQ |
| | | QWNYPLLTFGQGTKLEIK |
| SEQ ID NO: 1182 | VL-5 | AIQLTQSPSSLSASVGDRVTITCSASSSVSYMHWYQQKPGKAP |
| | | KLLIYEISKLASGVPSRFSGSGSGTDYTLTISSLQPEDFATYYCQ |
| | | QWNYPLLTFGQGTKLEIK |
| SEQ ID NO: 1183 | VL-6 | AIRLTQSPFSLSASVGDRVTITCSASSSVSYMHWYQQKPAKAP |
| | | KLFIYEISKLASGVPSRFSGSGSGTDYTLTISSLQPEDFATYYCQ |
| | | QWNYPLLTFGQGTKLEIK |
| SEQ ID NO: 1184 | VL-7 | DIVLTQSPDSLAVSLGERATINCSASSSVSYMHWYQQKPGQPP |
| | | KLLIYEISKLASGVPDRFSGSGSGTDYTLTISSLQAEDVAVYYC |
| | | QQWNYPLLTFGQGTKLEIK |

JOVI-3 (murine), also referred to as BJ1187 or Antibody K
Binds to human TCRVβ 28

| | | |
|---|---|---|
| SEQ ID NO: 1185 | HC CDR1 (Kabat) | GSWMN |
| SEQ ID NO: 1186 | HC CDR2 (Kabat) | RIYPGDGDTDYSGKFKG |
| SEQ ID NO: 1187 | HC CDR3 (Kabat) | SGYFNYVPVFDY |
| SEQ ID NO: 1188 | HC CDR1 (Chothia) | GYTFSGS |
| SEQ ID NO: 1189 | HC CDR2 (Chothia) | YPGDGD |
| SEQ ID NO: 1187 | HC CDR3 (Chothia) | SGYFNYVPVFDY |
| SEQ ID NO: 1190 | HC CDR1 (Combined) | GYTFSGSWMN |
| SEQ ID NO: 1186 | HC CDR2 (Combined) | RIYPGDGDTDYSGKFKG |
| SEQ ID NO: 1187 | HC CDR3 (Combined) | SGYFNYVPVFDY |
| SEQ ID NO: 1191 | LC CDR1 (Kabat) | SANSTVGYIH |
| SEQ ID NO: 1192 | LC CDR2 (Kabat) | TTSNLAS |
| SEQ ID NO: 1193 | LC CDR3 (Kabat) | HQWSFYPT |
| SEQ ID NO: 1194 | LC CDR1 (Chothia) | NSTVGY |
| SEQ ID NO: 1192 | LC CDR2 (Chothia) | TTSNLAS |
| SEQ ID NO: 1193 | LC CDR3 (Chothia) | HQWSFYPT |
| SEQ ID NO: 1191 | LC CDR1 (Combined) | SANSTVGYIH |
| SEQ ID NO: 1192 | LC CDR2 (Combined) | TTSNLAS |
| SEQ ID NO: 1193 | LC CDR3 (Combined) | HQWSFYPT |
| SEQ ID NO: 1195 | VL | QIVLTQSPAIMSASLGEEIALTCSANSTVGYIHWYQQKSGTSPK |
| | | LLIYTTSNLASGVPSRFSGSGSGTFYSLTISSVEAEDAADYFCH |
| | | QWSFYPTFGGGTKLEIK |
| SEQ ID NO: 1196 | VH | QIQLQQSGPEVVKPGASVQISCKASGYTFSGSWMNWVKQRPG |
| | | KGLEWIGRIYPGDGDTDYSGKFKGRATLTADKSSSTAYMRLSS |
| | | LTSEDSAVYFCARSGYFNYVPVFDYWGQGTTLSVSS |

VH for JOVI-3 (humanized) also referred to as Antibody K-H
Binds to human TCRVβ 28

| | | |
|---|---|---|
| SEQ ID NO: 1197 | VH-1 | QIQLVQSGAEVKKPGASVKVSCKASGYTFSGSWMNWVRQAP |
| | | GQGLEWIGRIYPGDGDTDYSGKFKGRATLTADKSTSTAYMEL |
| | | SSLRSEDTAVYYCARSGYFNYVPVFDYWGQGTTVTVSS |
| SEQ ID NO: 1198 | VH-2 | QIQLVQSGAEVKKPGSSVKVSCKASGYTFSGSWMNWVRQAP |
| | | GQGLEWIGRIYPGDGDTDYSGKFKGRATLTADKSTSTAYMEL |
| | | SSLRSEDTAVYYCARSGYFNYVPVFDYWGQGTTVTVSS |
| SEQ ID NO: 1199 | VH-3 | EIQLVQSGAEVKKPGESLKISCKASGYTFSGSWMNWVRQMPG |
| | | KGLEWIGRIYPGDGDTDYSGKFKGQATLSADKSISTAYLQWSS |
| | | LKASDTAMYYCARSGYFNYVPVFDYWGQGTTVTVSS |
| SEQ ID NO: 1200 | VH-4 | QIQLVQSGSELKKPGASVKVSCKASGYTFSGSWMNWVRQAP |
| | | GQGLEWIGRIYPGDGDTDYSGKFKGRAVLSADKSVSTAYLQIS |
| | | SLKAEDTAVYYCARSGYFNYVPVFDYWGQGTTVTVSS |
| SEQ ID NO: 1201 | VH-5 | QIQLVQSGSELKKPGASVKVSCKASGYTFSGSWMNWVRQAP |
| | | GQGLEWIGRIYPGDGDTDYSGKFKGRAVLSADKSVSMAYLQI |
| | | SSLKAEDTAVYYCARSGYFNYVPVFDYWGQGTTVTVSS |
| SEQ ID NO: 1202 | VH-6 | EIQLVESGGGLVQPGRSLRLSCTASGYTFSGSWMNWVRQAPG |
| | | KGLEWIGRIYPGDGDTDYSGKFKGRATLSADKSKSIAYLQMN |
| | | SLKTEDTAVYYCARSGYFNYVPVFDYWGQGTTVTVSS |

VL for JOVI-3 (humanized) also referred to as Antibody K-H
Binds to human TCRVβ 28

| | | |
|---|---|---|
| SEQ ID NO: 1203 | VL-1 | EIVLTQSPATLSLSPGERATLSCSANSTVGYIHWYQQKPGQAP |
| | | KLLIYTTSNLASGIPARFSGSGSGTDYTLTISSLEPEDFAVYFCH |
| | | QWSFYPTFGQGTKLEIK |
| SEQ ID NO: 1204 | VL-2 | DIQLTQSPSFLSASVGDRVTITCSANSTVGYIHWYQQKPGKAP |
| | | KLLIYTTSNLASGVPSRFSGSGSGTEYTLTISSLQPEDFATYFCH |
| | | QWSFYPTFGQGTKLEIK |
| SEQ ID NO: 1205 | VL-3 | EIVLTQSPATLSLSPGERATLSCSANSTVGYIHWYQQKPGQAP |
| | | KLLIYTTSNLASGIPARFSGSGPGTDYTLTISSLEPEDFAVYFCH |
| | | QWSFYPTFGQGTKLEIK |
| SEQ ID NO: 1206 | VL-4 | DIVLTQSPDSLAVSLGERATINCSANSTVGYIHWYQQKPGQPP |
| | | KLLIYTTSNLASGVPDRFSGSGSGTDYTLTISSLQAEDVAVYFC |
| | | HQWSFYPTFGQGTKLEIK |
| SEQ ID NO: 1207 | VL-5 | EIVLTQSPDFQSVTPKEKVTITCSANSTVGYIHWYQQKPDQSPK |
| | | LLIYTTSNLASGVPSRFSGSGSGTDYTLTINSLEAEDAATYFCH |
| | | QWSFYPTFGQGTKLEIK |

ZOE (murine), also referred to as BJ1538 or as Antibody L
Binds to human TCRVβ 4-1,4-2,4-3

| | | |
|---|---|---|
| SEQ ID NO: 1208 | HC CDR1 (Kabat) | DYYMY |
| SEQ ID NO: 1209 | HC CDR2 (Kabat) | TISGGGSYTYSPDSVKG |
| SEQ ID NO: 1210 | HC CDR3 (Kabat) | ERDIYYGNFNAMVY |
| SEQ ID NO: 1211 | HC CDR1 (Chothia) | GFTFSDY |
| SEQ ID NO: 1212 | HC CDR2 (Chothia) | SGGGSY |
| SEQ ID NO: 1210 | HC CDR3 (Chothia) | ERDIYYGNFNAMVY |
| SEQ ID NO: 1213 | HC CDR1 (Combined) | GFTFSDYYMY |
| SEQ ID NO: 1209 | HC CDR2 (Combined) | TISGGGSYTYSPDSVKG |
| SEQ ID NO: 1210 | HC CDR3 (Combined) | ERDIYYGNFNAMVY |
| SEQ ID NO: 1214 | LC CDR1 (Kabat) | RASKSVSTSGYSYMH |
| SEQ ID NO: 1215 | LC CDR2 (Kabat) | LASNLES |
| SEQ ID NO: 1216 | LC CDR3 (Kabat) | QHSRDLPWT |
| SEQ ID NO: 1217 | LC CDR1 (Chothia) | SKSVSTSGYSY |
| SEQ ID NO: 1215 | LC CDR2 (Chothia) | LASNLES |
| SEQ ID NO: 1216 | LC CDR3 (Chothia) | QHSRDLPWT |
| SEQ ID NO: 1214 | LC CDR1 (Combined) | RASKSVSTSGYSYMH |
| SEQ ID NO: 1215 | LC CDR2 (Combined) | LASNLES |
| SEQ ID NO: 1216 | LC CDR3 (Combined) | QHSRDLPWT |
| SEQ ID NO: 1218 | VL | DIVLTQSPVSLTVSLGQRATISCRASKSVSTSGYSYMHWYQQK |
| | | PGQPPKLLIYLASNLESGVPARFSGSGSGTDFTLNIHPVEEEDA |
| | | ATYYCQHSRDLPWTFGGGTKLEIK |
| SEQ ID NO: 1219 | VH | EVQLVESGGGLVKPGGSLKLSCAASGFTFSDYYMYWVRQTPE |
| | | KRLEWVATISGGGSYTYSPDSVKGRFTISRDNAKNNLYLQMSS |
| | | LRSEDTAMYFCARERDIYYGNFNAMVYWGRGTSVTVSS |

VH for ZOE (humanized) also referred to as Antibody L-H
Binds to human TCRVβ 4-1,4-2,4-3

| | | |
|---|---|---|
| SEQ ID NO: 1220 | VH-1 | EVQLLESGGGLVQPGGSLRLSCAASGFTFSDYYMYWVRQAPG |
| | | KGLEWVATISGGGSYTYSPDSVKGRFTISRDNSKNTLYLQMNS |
| | | LRAEDTAVYYCARERDIYYGNFNAMVYWGRGTLVTVSS |
| SEQ ID NO: 1221 | VH-2 | EVQLVESGGGLVQPGGSLRLSCAASGFTFSDYYMYWVRQAPG |
| | | KGLEWVATISGGGSYTYSPDSVKGRFTISRDNAKNSLYLQMNS |
| | | LRAEDTAVYYCARERDIYYGNFNAMVYWGRGTLVTVSS |
| SEQ ID NO: 1222 | VH-3 | QVQLVESGGGVVQPGRSLRLSCAASGFTFSDYYMYWVRQAP |
| | | GKGLEWVATISGGGSYTYSPDSVKGRFTISRDNSKNTLYLQM |
| | | NSLRAEDTAVYYCARERDIYYGNFNAMVYWGRGTLVTVSS |
| SEQ ID NO: 1223 | VH-4 | QVQLVESGGGLVKPGGSLRLSCAASGFTFSDYYMYWIRQAPG |
| | | KGLEWVATISGGGSYTYSPDSVKGRFTISRDNAKNSLYLQMNS |
| | | LRAEDTAVYYCARERDIYYGNFNAMVYWGRGTLVTVSS |

VL for ZOE (humanized) also referred to as Antibody L-H
Binds to human TCRVβ 4-1,4-2,4-3

| | | |
|---|---|---|
| SEQ ID NO: 1224 | VL-1 | EIVLTQSPGTLSLSPGERATLSCRASKSVSTSGYSYMHWYQQK |
| | | PGQAPRLLIYLASNLESGIPDRFSGSGSGTDFTLTISRLEPEDFA |
| | | VYYCQHSRDLPWTFGGGTKVEIK |
| SEQ ID NO: 1225 | VL-2 | EIVLTQSPATLSLSPGERATLSCRASKSVSTSGYSYMHWYQQK |
| | | PGQAPRLLIYLASNLESGIPARFSGSGSGTDFTLTISSLEPEDFAV |
| | | YYCQHSRDLPWTFGGGTKVEIK |
| SEQ ID NO: 1226 | VL-3 | DIQLTQSPSTLSASVGDRVTITCRASKSVSTSGYSYMHWYQQK |
| | | PGKAPKLLIYLASNLESGVPSRFSGSGSGTEFTLTISSLQPDDFA |
| | | TYYCQHSRDLPWTFGGGTKVEIK |
| SEQ ID NO: 1227 | VL-4 | AIQLTQSPSSLSASVGDRVTITCRASKSVSTSGYSYMHWYQQK |
| | | PGKAPKLLIYLASNLESGVPSRFSGSGSGTDFTLTISSLQPEDFA |
| | | TYYCQHSRDLPWTFGGGTKVEIK |

Anti-TCRvb19 (murine), also referred to as BJ1465; or Antibody M
Binds to human TCRVβ 19

| | | |
|---|---|---|
| SEQ ID NO: 1229 | HC CDR1 (Kabat) | GYFWN |
| SEQ ID NO: 1230 | HC CDR2 (Kabat) | YISYDGSNNYNPSLKN |
| SEQ ID NO: 1231 | HC CDR3 (Kabat) | PSPGTGYAVDY |
| SEQ ID NO: 1232 | HC CDR1 (Chothia) | GYSITSGY |
| SEQ ID NO: 1233 | HC CDR2 (Chothia) | SYDGSN |
| SEQ ID NO: 1231 | HC CDR3 (Chothia) | PSPGTGYAVDY |
| SEQ ID NO: 1234 | HC CDR1 (Combined) | GYSITSGYFWN |
| SEQ ID NO: 1230 | HC CDR2 (Combined) | YISYDGSNNYNPSLKN |
| SEQ ID NO: 1231 | HC CDR3 (Combined) | PSPGTGYAVDY |
| SEQ ID NO: 1235 | LC CDR1 (Kabat) | RSSQSLVHSNGNTYLH |
| SEQ ID NO: 1236 | LC CDR2 (Kabat) | KVSNRFS |
| SEQ ID NO: 1237 | LC CDR3 (Kabat) | SQSTHVPFT |
| SEQ ID NO: 1238 | LC CDR1 (Chothia) | SQSLVHSNGNTY |
| SEQ ID NO: 1236 | LC CDR2 (Chothia) | KVSNRFS |
| SEQ ID NO: 1237 | LC CDR3 (Chothia) | SQSTHVPFT |
| SEQ ID NO: 1235 | LC CDR1 (Combined) | RSSQSLVHSNGNTYLH |
| SEQ ID NO: 1236 | LC CDR2 (Combined) | KVSNRFS |
| SEQ ID NO: 1237 | LC CDR3 (Combined) | SQSTHVPFT |
| SEQ ID NO: 1239 | VL | NVVMTQTPLSLPVSLGDQASISCRSSQSLVHSNGNTYLHWYLQ |
| | | KPGQSPKFLIYKVSNRFSGVPDRFSGGGSGTEFTLKISRVEAED |
| | | LGVYFCSQSTHVPFTFGSGTKLEIK |
| SEQ ID NO: 1240 | VH | NVQLQESGPGLVKPSQSLSLTCSVAGYSITSGYFWNWIRQFPG |
| | | NKLEWMGYISYDGSNNYNPSLKNRISITRDTSKNQFFLKLNSV |
| | | TTEDTATYYCASPSPGTGYAVDYWGQGTSVTVSS |

VH for Anti-TCRvb19 (humanized) also referred to as Antibody M-H
Binds to human TCRVβ 19

| | | |
|---|---|---|
| SEQ ID NO: 1241 | VH-1 | QVQLQESGPGLVKPSETLSLTCTVSGYSITSGYFWNWIRQPPG |
| | | KGLEWIGYISYDGSNNYNPSLKNRVTISRDTSKNQFSLKLSSVT |
| | | AADTAVYYCASPSPGTGYAVDYWGQGTLVTVSS |
| SEQ ID NO: 1242 | VH-2 | QVQLQESGPGLVKPSETLSLTCTVSGYSITSGYFWNWIRQPPG |
| | | KGLEWIGYISYDGSNNYNPSLKNRVTISRDTSKNQFSLKLSSVT |
| | | AADTAVYYCASPSPGTGYAVDYWGQGTLVTVSS |
| SEQ ID NO: 1243 | VH-3 | QVQLVESGGGLVQPGGSLRLSCSVSGYSITSGYFWNWVRQAP |
| | | GKGLEWVGYISYDGSNNYNPSLKNRFTISRDTSKNTFYLQMNS |
| | | LRAEDTAVYYCASPSPGTGYAVDYWGQGTLVTVSS |

VL for Anti-TCRvb19 (humanized) also referred to as Antibody M-H
Binds to human TCRVβ 19

| | | |
|---|---|---|
| SEQ ID NO: 1244 | VL-1 | VVMTQSPGTLSLSPGERATLSCRSSQSLVHSNGNTYLHWYQQ |
| | | KPGQAPRFLIYKVSNRFSGIPDRFSGSGSGTDFTLTISRLEPEDF |
| | | AVYFCSQSTHVPFTFGQGTKLEIK |
| SEQ ID NO: 1245 | VL-2 | EVVMTQSPATLSLSPGERATLSCRSSQSLVHSNGNTYLHWYQ |
| | | QKPGQAPRFLIYKVSNRFSGIPARFSGSGSGTDFTLTISSLEPED |
| | | FAVYFCSQSTHVPFTFGQGTKLEIK |
| SEQ ID NO: 1246 | VL-3 | EVVMTQSPATLSVSPGERATLSCRSSQSLVHSNGNTYLHWYQ |
| | | QKPGQAPRFLIYKVSNRFSGIPARFSGSGSGTEFTLTISSLQSED |
| | | FAVYFCSQSTHVPFTFGQGTKLEIK |
| SEQ ID NO: 1247 | VL-4 | DVQMTQSPSSLSASVGDRVTITCRSSQSLVHSNGNTYLHWYQ |
| | | QKPGKAPKFLIYKVSNRFSGVPSRFSGSGSGTDFTFTISSLQPED |
| | | IATYFCSQSTHVPFTFGQGTKLEIK |

BL37.2 (murine), also referred to as BJ1539 or Antibody N
Binds to human TCRVβ 9

| | | |
|---|---|---|
| SEQ ID NO: 1248 | HC CDR1 (Kabat) | DYIVH |
| SEQ ID NO: 1249 | HC CDR2 (Kabat) | WINTYTGTPTYADDFEG |
| SEQ ID NO: 1250 | HC CDR3 (Kabat) | SWRRGIRGIGFDY |
| SEQ ID NO: 1251 | HC CDR1 (Chothia) | GYTFTDY |
| SEQ ID NO: 1252 | HC CDR2 (Chothia) | NTYTGT |
| SEQ ID NO: 1250 | HC CDR3 (Chothia) | SWRRGIRGIGFDY |
| SEQ ID NO: 1253 | HC CDR1 (Combined) | GYTFTDYIVH |
| SEQ ID NO: 1249 | HC CDR2 (Combined) | WINTYTGTPTYADDFEG |
| SEQ ID NO: 1250 | HC CDR3 (Combined) | SWRRGIRGIGFDY |
| SEQ ID NO: 1254 | LC CDR1 (Kabat) | KASKSINKYLA |
| SEQ ID NO: 1255 | LC CDR2 (Kabat) | DGSTLQS |
| SEQ ID NO: 1256 | LC CDR3 (Kabat) | QQHNEYPPT |
| SEQ ID NO: 1257 | LC CDR1 (Chothia) | SKSINKY |
| SEQ ID NO: 1255 | LC CDR2 (Chothia) | DGSTLQS |
| SEQ ID NO: 1256 | LC CDR3 (Chothia) | QQHNEYPPT |
| SEQ ID NO: 1254 | LC CDR1 (Combined) | KASKSINKYLA |
| SEQ ID NO: 1255 | LC CDR2 (Combined) | DGSTLQS |
| SEQ ID NO: 1256 | LC CDR3 (Combined) | QQHNEYPPT |
| SEQ ID NO: 1258 | VL | DVQMTQSPYNLAASPGESVSINCKASKSINKYLAWYQQKPGK |
| | | PNKLLIYDGSTLQSGIPSRFSGSGSGTDFTLTIRGLEPEDFGLYY |
| | | CQQHNEYPPTFGAGTKLELK |
| SEQ ID NO: 1259 | VH | QLQLVQSGPELREPGESVKISCKASGYTFTDYIVHWVKQAPGK |
| | | GLKWMGWINTYTGTPTYADDFEGRFVFSLEASASTANLQISNL |
| | | KNEDTATYFCARSWRRGIRGIGFDYWGQGVMVTVSS |

VH for BL37.2 (humanized) also referred to as Antibody N-H
Binds to human TCRVβ 9

| | | |
|---|---|---|
| SEQ ID NO: 1260 | VH-1 | QLQLVQSGAEVKKPGASVKVSCKASGYTFTDYIVHWVRQAP |
| | | GQGLEWMGWINTYTGTPTYADDFEGWVTMTLDASISTAYME |
| | | LSRLRSDDTAVYYCARSWRRGIRGIGFDYWGQGTMVTVSS |
| SEQ ID NO: 1261 | VH-2 | QLQLVQSGAEVKKPGASVKVSCKASGYTFTDYIVHWVRQAP |
| | | GQGLEWMGWINTYTGTPTYADDFEGRVTMTLDASTSTAYME |
| | | LSSLRSEDTAVYYCARSWRRGIRGIGFDYWGQGTMVTVSS |
| SEQ ID NO: 1262 | VH-3 | QLQLVQSGAEVKKPGASVKVSCKASGYTFTDYIVHWVRQAP |
| | | GQRLEWMGWINTYTGTPTYADDFEGRVTITLDASASTAYMEL |
| | | SSLRSEDMAVYYCARSWRRGIRGIGFDYWGQGTMVTVSS |
| SEQ ID NO: 1263 | VH-4 | QLQLVQSGAEVKKPGASVKVSCKASGYTFTDYIVHWVRQAT |
| | | GQGLEWMGWINTYTGTPTYADDFEGRVTMTLNASISTAYME |
| | | LSSLRSEDTAVYYCARSWRRGIRGIGFDYWGQGTMVTVSS |

VL for BL37.2 (humanized) also referred to as Antibody N-H
Binds to human TCRVβ 9

| | | |
|---|---|---|
| SEQ ID NO: 1264 | VL-1 | EVVMTQSPGTLSLSPGERATLSCKASKSINKYLAWYQQKPGQ |
| | | APRLLIYDGSTLQSGIPDRFSGSGSGTDFTLTISRLEPEDFAVYY |
| | | CQQHNEYPPTFGQGTKLEIK |
| SEQ ID NO: 1265 | VL-2 | EVVMTQSPATLSLSPGERATLSCKASKSINKYLAWYQQKPGQ |
| | | APRLLIYDGSTLQSGIPARFSGSGSGTDFTLTISSLEPEDFAVYY |
| | | CQQHNEYPPTFGQGTKLEIK |
| SEQ ID NO: 1266 | VL-3 | DVQMTQSPSSLSASVGDRVTITCKASKSINKYLAWYQQKPGK |
| | | APKLLIYDGSTLQSGVPSRFSGSGSGTDFTLTISSLQPEDFATYY |
| | | CQQHNEYPPTFGQGTKLEIK |
| SEQ ID NO: 1267 | VL-4 | AVRMTQSPSSFSASTGDRVTITCKASKSINKYLAWYQQKPGK |
| | | APKLLIYDGSTLQSGVPSRFSGSGSGTDFTLTISCLQSEDFATYY |
| | | CQQHNEYPPTFGQGTKLEIK |

IG125 (murine) binds to TRVβ 11-2; also referred to as Antibody O

| | | |
|---|---|---|
| SEQ ID NO: 1268 | HC CDR1 (Kabat) | NYGVH |
| SEQ ID NO: 1269 | HC CDR2 (Kabat) | VIWSDGSTDYDTAFIS |
| SEQ ID NO: 1270 | HC CDR3 (Kabat) | RAVVADFDY |
| SEQ ID NO: 1271 | HC CDR1 (Chothia) | GFSLTN |
| SEQ ID NO: 1272 | HC CDR2 (Chothia) | VIWSDGSTD |
| SEQ ID NO: 1270 | HC CDR3 (Chothia) | RAVVADFDY |
| SEQ ID NO: 1273 | HC CDR1 (combined) | GFSLTNYGVH |
| SEQ ID NO: 1269 | HC CDR2 (combined) | VIWSDGSTDYDTAFIS |
| SEQ ID NO: 1270 | HC CDR3 (combined) | RAVVADFDY |
| SEQ ID NO: 1274 | VH | QVQLKQSGPGLLQPSQSLSITCTVSGFSLTNYGVHWVRQSPGK |
| | | GLEWLGVIWSDGSTDYDTAFISRLSISKDNSKSQVFFKLNSLQ |
| | | ADDTAIYYCARRAVVADFDYWGQGTTLTVSS |
| SEQ ID NO: 1275 | LC CDR1 (Kabat) | KASKEVTIFGSISALH |
| SEQ ID NO: 1276 | LC CDR2 (Kabat) | NGAKLES |
| SEQ ID NO: 1277 | LC CDR3 (Kabat) | LQNKEVPFT |
| SEQ ID NO: 1275 | LC CDR1 (Chothia) | KASKEVTIFGSISALH |
| SEQ ID NO: 1276 | LC CDR2 (Chothia) | NGAKLES |
| SEQ ID NO: 1277 | LC CDR3 (Chothia) | LQNKEVPFT |
| SEQ ID NO: 1275 | LC CDR1 (combined) | KASKEVTIFGSISALH |
| SEQ ID NO: 1276 | LC CDR2 (combined) | NGAKLES |
| SEQ ID NO: 1277 | LC CDR3 (combined) | LQNKEVPFT |
| SEQ ID NO: 1278 | VL | DIVLTQSPASLAVSLGQKATISCKASKEVTIFGSISALHWYQQ |
| | | KPGQPPKLIYNGAKLESGVSARFSDSGSQNRSPFGNQLSFTLTI |
| | | APVEADDAATYYCLQNKEVPFTFGSGTKLEIK |

VL for IG125 (humanized) also referred to as Antibody O-H
binds to TRVβ 11-2

| | | |
|---|---|---|
| SEQ ID NO: 1279 | VL-1 | DIVLTQSPDSLAVSLGERATINCKASKEVTIFGSISALHWYQQ |
| | | KPGQPPKLLYNGAKLESGVSARFGVPDRFSRSGSGLDFTLTIS |
| | | SLQAEDVAVYYCLQNKEVPFTFGQGTKLEIK |
| SEQ ID NO: 1280 | VL-2 | EIVLTQSPDFQSVTPKEKVTITCKASKEVTIFGSISALHWYQQK |
| | | PDQSPKLLYNGAKLESGVSARFGVPSRFSRSGSGLDFTLTINS |
| | | LEAEDAATYYCLQNKEVPFTFGQGTKLEIK |
| SEQ ID NO: 1281 | VL-3 | AIQLTQSPSSLSASVGDRVTITCKASKEVTIFGSISALHWYQQK |
| | | PGKAPKLLYNGAKLESGVSARFGVPSRFSRSGSGLDFTLTISS |
| | | LQPEDFATYYCLQNKEVPFTFGQGTKLEIK |
| SEQ ID NO: 1282 | VL-4 | DIVLTQTPLSLSVTPGQPASISCKASKEVTIFGSISALHWYLQK |
| | | PGQPPKLLYNGAKLESGVSARFGVPDRFSRSGSGLDFTLKISR |
| | | VEAEDVGVYYCLQNKEVPFTFGQGTKLEIK |

VH for IG125 (humanized) also referred to as Antibody O-H
binds to TRVβ 11-2

| | | |
|---|---|---|
| SEQ ID NO: 1283 | VH-1 | QVTLKESGPVLVKPTETLTLTCTVSGFSLTNYGVHWVRQPPG |
| | | KALEWLGVIWSDGSTDYDTAFISRLTISKDNSKSQVVLTMTN |
| | | MDPVDTATYYCARRAVVADFDYWGQGTTVTVSS |
| SEQ ID NO: 1284 | VH-2 | QVQLQESGPGLVKPSGTLSLTCAVSGFSLTNYGVHWVRQPPG |
| | | KGLEWLGVIWSDGSTDYDTAFISRLTISKDNSKSQVSLKLSSV |
| | | TAADTAVYYCARRAVVADFDYWGQGTTVTVSS |
| SEQ ID NO: 1285 | VH-3 | QVQLQQSGPGLVKPSQTLSLTCAVSGFSLTNYGVHWVRQSPS |
| | | RGLEWLGVIWSDGSTDYDTAFISRLTINKDNSKSQVSLQLNS |
| | | VTPEDTAVYYCARRAVVADFDYWGQGTTVTVSS |
| SEQ ID NO: 1286 | VH-4 | EVQLVESGGGLVQPGPSLRLSCTVSGFSLTNYGVHWVRQAP |
| | | GKGLEWLGVIWSDGSTDYDTAFISRLTISKDNSKSIVYLQMNS |
| | | LKTEDTAVYYCARRAVVADFDYWGQGTTVTVSS |
| SEQ ID NO: 1287 | VH-5 | EVQLVQSGAEVKKPGESLRISCKVSGFSLTNYGVHWVRQMP |
| | | GKGLEWLGVIWSDGSTDYDTAFISQLTISKDNSISTVYLQWSS |
| | | LKASDTAMYYCARRAVVADFDYWGQGTTVTVSS |

MR5-2 (murine), Binds to human TCRVβ 13-2

| | | |
|---|---|---|
| SEQ ID NO: 1376 | SCFV (VH + VL) | QVQLQQSGTELMKPGASVKISCKASGYTFSNYWIEWIKQRPG |
| | | HGLEWVGEILPGAGPTNYNEKFKGKATFTADSSSNTAYMQL |
| | | SSLTSEDSAVYYCARTDYDYDWFAYWGQGTLVTVSAGGGG |
| | | SGGGGSGGGGSGGGGSDIVMSQSPSSLAVSVGEKVTMSCKSS |
| | | QSLLYSGNQKNYLAWYQQKPGQSPKLLIYWASTRESGVPDR |
| | | FTGSGSGTDFTLTINSVKAEDLTVYYCQQYYGYPRTFGGGTK |
| | | VEIK |

TABLE 14
Exemplary Fc modifications

| Modification or mutation | Altered effector function |
|---|---|
| Leu235Glu | ADCC; |
| Leu234Ala/Leu235Ala (LALA) | ADCC; ADCP; CDC |
| Ser228Pro/Leu235Glu | |
| Leu234Ala/Leu235Ala/Pro329Gly | ADCP |
| Pro331Ser/Leu234Glu/Leu235Phe | CDC |
| Asp265Ala | ADCC, ADCP |
| Gly237Ala | ADCP |
| Glu318Ala | ADCP |
| Glu233Pro | |
| Gly236Arg/Leu328Arg | ADCC |
| His268Gln/Val309Leu/Ala330Ser/Pro331Ser | ADCC; ADCP; CDC |
| Val234Ala/Gly237Ala/Pro238Ser/ | ADCC; ADCP; CDC |
| His268Ala/Val309Leu/Ala330Ser/Pro331Ser | |
| Leu234Ala/L235Ala/Gly237Ala/P238Ser/ | ADCC; CDC |
| His268Ala/Ala330Ser/Pro331Ser | |
| Ala330Leu | CDC |
| Asp270Ala | CDC |
| Lys322Ala | CDC |
| Pro329Ala | CDC |
| Pro331Ala | CDC |
| Val264Ala | CDC |
| High mannose glycosylation | CDC |
| Phe241Ala | CDC |
| Asn297Ala or Gly or Gln | ADCC; ADCP; CDC |
| S228P/Phe234Ala/Leu235Ala | ADCC; CDC |

TABLE 15
Amino acid sequences of exemplary variable regions of anti-BCMA antibodies.

| SEQ ID | | |
|---|---|---|
| NO | Description | Sequence |
| 3439 | 83A10 VH | EVQLLESGGGLVQPGGSLRLSCAASGFTFSSYAMSWVRQAPGKGLEWVSAISG |
| | | SGGSTYYADSVKGRFTISRDNSKNTLYLQMNSLRAEDTAVYYCAKVLGWFDY |
| | | WGQGTLVTVSS |
| 3440 | 83A10 VL | EIVLTQSPGTLSLSPGERATLSCRASQSVSSSYLAWYQQKPGQAPRLLIYGASSR |
| | | ATGIPDRFSGSGSGTDFTLTISRLEPEDFAVYYCQQYGYPPDFTFGQGTKVEIK |
| 3441 | 17A5 VH | EVQLLESGGGLVQPGGSLRLSCAASGFTFSSYAMSWVRQAPGKGLEWVSAISG |
| | | SGGSTYYADSVKGRFTISRDNSKNTLYLQMNSLRAEDTAVYYCAKVAPYFAPF |
| | | DYWGQGTLVTVSS |
| 3442 | 17A5 VL | EIVLTQSPGTLSLSPGERATLSCRASQSVSSSYLAWYQQKPGQAPRLLIYGASSR |
| | | ATGIPDRFSGSGSGTDFTLTISRLEPEDFAVYYCQQYGNPPLYTFGQGTKVEIK |
| 3443 | 13A4 VH | EVQLVQSGAEVKKPGESLKISCKGSGYSFTSYWIGWVRQMPGKGLEWMGIIYP |
| | | GDSDTRYSPSFQGQVTISADKSISTAYLQWSSLKASDTAMYYCARNGYLGDYW |
| | | GQGTLVTVSS |
| 3444 | 13A4 VL | DIVMTQSPLSLPVTPGEPASISCRSSQSLLHSNGYNYLDWYLQKPGQSPQLLIYL |
| | | GSNRASGVPDRFSGSGSGTDFTLKISRVEAEDVGVYYCMQAMQIPTFGQGTKV |
| | | EIK |
| 3445 | J22.9-xi VH | QVQLQQSGGGLVQPGGSLKLSCAASGIDFSRYWMSWVRRAPGKGLEWIGEINP |
| | | DSSTINYAPSLKDKFIISRDNAKNTLYLQMSKVRSEDTALYYCASLYYDYGDA |
| | | MDYWGQGTSVTVSS |
| 3446 | J22.9-xi VL | DIVMTQSQRFMTTSVGDRVSVTCKASQSVDSNVAWYQQKPRQSPKALIFSASL |
| | | RFSGVPARFTGSGSGTDFTLTISNLQSEDLAEYFCQQYNNYPLTFGAGTKLELK |
| | | R |
| 3447 | 2A1 VH | EVQLVESGGGLVKPGGSLRLSCAASGFTFGDYALSWFRQAPGKGLEWVGVSR |
| | | SKAYGGTTDYAASVKGRFTISRDDSKSTAYLQMNSLKTEDTAVYYCASSGYSS |
| | | GWTPFDYWGQGTLVTVSS |
| 3448 | 2A1 VL | QSVLTQPPSASGTPGQRVTISCSGSSSNIGSNTVNWYQQLPGTAPKLLIFNYHQR |
| | | PSGVPDRFSGSKSGSSASLAISGLQSEDEADYYCAAWDDSLNGWVFGGGTKLT |
| | | VLG |

### EXAMPLES

[1139] The present disclosure will be more specifically illustrated by the following Examples. However, it should be understood that the present disclosure is not limited by these examples in any manner.

### Example 1: Humanization of α-TRBV6-5 Antibody Clone Anti-Body A

[1140] The germline for the mouse α-TCRβ antibody clone Antibody A VH and VL were assigned using IMGT nomenclature, with CDR regions defined by a combined Kabat and Chothia classification. SEQ ID NO: 1 and SEQ ID NO: 2 are the Antibody A VH and VL sequences respectively where the VH germline is mouse IGHV1S12*01 and the VL germline is mouse IGKV6-15*01. SEQ ID NOs: 3-5 are the Antibody A VH CDR regions 1-3 respectively and SEQ ID NOs: 6-8 correspond to the VL CDR regions 1-3 (as described in Table 1).

[1141] Humanization of the Antibody A VH and VL sequences was done separately using similar methodology. Amino acids positions were identified in the framework regions which were important for the success of CDR grafting. Human germline sequences were identified which preserved the necessary residues and contained a high amount of overall identity. When the human germline framework sequence did not contain a matching important amino acid, it was back mutated to match the mouse sequence. CDR regions were grafted onto the human germline unchanged. The Antibody A VH was humanized into human IGHV1-69*01 and the Antibody A VL was humanized into IGKV1-17*01 and IGKV1-27*01. All 3 humanized sequences were confirmed to contain no introduced potential negative post translational modification sites such as NG, DG, NS, NN, DS, NT, NXS, or NXT as a result of the humanization process. SEQ ID NO: 9 is the humanized Antibody A-H.1 VH and SEQ ID NOs: 10 and 11 are the humanized VL IGKV1-17*01 and IGKV1-27*01 germlines respectively (as described in Table 1). FIGS. 2A and 2B show the murine and humanized sequences with annotations depicting the CDR and framework regions (FR).

### Example 2: Humanization of α-TRBV12-3 and TRBV12-4 Antibody Clone Antibody B

[1142] The germline for the mouse α-TCRβ antibody clone Antibody B VH and VL were assigned using IMGT nomenclature, with CDR regions defined by a combined Kabat and Chothia classification. SEQ ID NO: 15 and SEQ ID NO: 16 are the Antibody B VH and VL sequences respectively where the VH germline is mouse IGHV5-17*02 and the VL germline is mouse IGKV4-50*01. SEQ ID NOs: 17-19 are the B-H VH CDR regions 1-3 respectively and SEQ ID NOs: 20-22 are the B-H VL CDR regions 1-3 (as described in Table 2).

[1143] The method applied to humanize Antibody A described in Example 1 was used to humanize Antibody B. The Antibody B VH was humanized into human IGHV3-30*01, IGHV3-48*01, and IGHV3-66*01 and the Antibody B VL was humanized into human IGKV1-9*01, IGKV1-39*01, IGKV3-15*01, IGLV1-47*01 and IGLV3-10*01. SEQ ID NOs: 23-25 are the B-H.1A, B-H.1B, and B-H.1C humanized heavy chains and SEQ ID NOs: 26-30 are the B-H.1D, B-H.1E, B-H.1F, B-H.1G and B-H.1H humanized light chains (as described in Table 2). FIGS. 3A and 3B show the murine and humanized sequences with annotations depicting the CDR and framework regions (FR).

### Example 3: Characteristics of Anti-TCRβV Antibodies

### Introduction

[1144] Current bispecific constructs designed to redirect T cells to promote tumor cell lysis for cancer immunotherapy typically utilize single chain variable fragments (scFVs) that are derived from monoclonal antibodies (mAb) directed against the CD3e subunit of the T cell receptor (TCR). However, there are limitations to this approach which may prevent the full realization of the therapeutic potential for such bispecific constructs. Previous studies have shown that, e.g., low “activating” doses of anti-CD3e mAb can cause long-term T cell dysfunction and exert immunosuppressive effects. In addition, anti-CD3e mAbs bind to all T cells and thus activate equally all T cells, which has been associated with the first dose side effects of anti-CD3e mAbs that result from massive T cell activation. These large number of activated T cells secrete substantial amounts of cytokines, the most important of which is Interferon gamma (IFNg or IFNγ). This excess amount of IFNγ in turn, e.g., activates macrophages which then can overproduce proinflammatory cytokines such as IL-1, IL-6 and TNF-alpha, causing a “cytokine storm” known as the cytokine release syndrome (CRS). Thus, it might be advantageous to develop antibodies that are capable of binding and activating only a subset of necessary effector T cells to reduce the CRS.

### Results

[1145] To that end, antibodies directed to the variable chain of the beta subunit of TCR (TCR Vb) were identified. These anti-TCR Vb antibodies bind and activate a subset of T cells, but with, e.g., no or markedly reduced CRS. Using plate-bound anti-TCR Vb13.1 mAbs (A-H.1 and A-H.2) it was shown that a population of T cells, defined by positive staining with A-H.1, can be expanded (from ˜5% of T cells on day 0 to almost 60% of total T cells on day 6 of cell culture) (FIGS. 5A-5C). For this experiment, human CD3+ T cells were isolated using magnetic-bead separation (negative selection) and activated with immobilized (plate-coated) A-H.1 or OKT3 (anti-CD3e) antibodies at 100 nM for 6 days. The expanded Vb13.1+ T cells display cytolytic activity against transformed cell line RPMI-8226 when co-cultured with purified CD3+ T cells (FIGS. 6A-6B).

[1146] Next, the ability of PBMCs activated by anti-TCR VB antibodies to produce cytokines was assessed. The cytokine production of PBMCs activated with anti-TCR VB antibodies was compared to the cytokine production of PBMCs activated with: (i) anti-CD3e antibodies (OKT3 or SP34-2); (ii) anti-TCR V alpha (TCR VA) antibodies including anti-TCR VA 12.1 antibody 6D6.6, anti-TCR VA24JA18 antibody 6B11; (iii) anti-TCR alpha beta antibody T10B9; and/or (iv) isotype control (BGMO109). The anti-TCR VB antibodies tested include: humanized anti-TCRVB 13.1 antibodies (A-H.1, or A-H.2), murine anti-TCR VB5 antibody E, murine anti-TCR VB8.1 antibody B, and murine anti-TCR VB12 antibody D. BGM0109 comprises the amino acid sequence of

(SEQ ID NO: 3282)
METDTLLLWVLLLWVPGSTGGLNDIFEAQKIEWHEGGGGSEPRTDTDTC
PNPPDPCPTCPTPDLLGGPSVFIFPPKPKDVLMISLTPKITCVVVDVSE
EEPDVQFNWYVNNVEDKTAQTETRQRQYNSTYRVVSVLPIKHQDWMSGK
VFKCKVNNNALPSPIEKTISKPRGQVRVPQIYTFPPPIEQTVKKDVSVT
CLVTGFLPQDIHVEWESNGQPQPEQNYKNTQPVLDSDGSYFLYSKLNVP
KSRWDQGDSFTCSVIHEALHNHHMTKTISRSLGNGGGGS.

[1147] As shown in FIG. 7A, when plate-bound A-H.1 or A-H.2, or anti-CD3e antibodies (OKT3 or SP34-2) were used to activate human PBMCs, the T cell cytokine IFNg was induced (FIG. 7A). All anti-TCR VB antibodies tested had a similar effect on the production of IFNg (FIG. 7B). The anti-TCR VA antibodies did not induce similar IFNg production.

[1148] With respect to IL-2 production, PBMCs activated with A-H.1 and A-H.2 resulted in increased IL-2 production (FIG. 8A) with delayed kinetics (FIG. 8B) as compared to PBMCs activated with anti-CD3e antibodies (OKT3 or SP34-2). FIG. 8B shows that anti-TCR VB antibody activated PBMCs demonstrate peak production of IL-2 at Day 5 or Day 6 post-activation (incubation with plate-coated antibodies). In contrast, IL-2 production in PBMCs activated with OKT3 peaked at day 2 post-activation. As with IFNG, the IL-2 effect (e.g., enhanced production of IL-2 and delayed kinetics) was similar across all anti-TCR VB antibodies tested (FIG. 8B).

[1149] The production of cytokines IL-6, IL-13 and TNF-alpha which are associated with “cytokine storms” (and accordingly CRS) was also assessed under similar conditions. FIGS. 9A, 9A and 10A shows that while PBMCs activated with anti-CD3e antibodies demonstrate production of IL-6 (FIG. 9A), TNF-alpha (FIG. 10A) and IL-1β (FIG. 11A), no or little induction of these cytokines was observed with PBMCs activated with A-H.1 or A-H.2. As shown in FIGS. 10B and 11B, TNF-alpha and IL-1β production was not induced by activation of PBMCs with any of the anti-TCR VB antibodies.

[1150] It was further noted that the kinetics of IFNg production by A-H.1-activated CD3+ T cells was delayed relative to those produced by CD3+ T cells activated by anti-CD3e mAbs (OKT3 and SP34-2) (FIGS. 12A and 12B).

[1151] Finally, it was observed that the subset of memory effector T cells known as T_{EMRA} was preferentially expanded in CD8+ T cells activated by A-H.1 or A-H.2 (FIG. 13). Isolated human PBMCs were activated with immobilized (plate-coated) anti-CD3e or anti-TCR Vβ 13.1 at 100 nM for 6-days. After a 6-day incubation, T-cell subsets were identified by FACS staining for surface markers for Naive T cell (CD8+, CD95−, CD45RA+, CCR7+), T stem cell memory (TSCM; CD8+, CD95+, CD45RA+, CCR7+), T central memory (Tcm; CD8+, CD95+, CD45RA−, CCR7+), T effector memory (Tem; CD8+, CD95+, CD45RA−, CCR7−), and T effector memory re-expressing CD45RA (Temra; CD8+, CD95+, CD45RA+, CCR7−). Human PBMCs activated by anti-TCR Vβ 313.1 antibodies (A-H.1 or A-H.2) increased CD8+ TSCM and Temra T cell subsets when compared to PBMCs activated by anti-CD3e antibodies (OKT3 or SP34-2). Similar expansion was observed with CD4+ T cells.

### Conclusion

[1152] The data provided in this Example show that antibodies directed against TCR Vb can, e.g., preferentially activate a subset of T cells, leading to an expansion of T_{EM}RA, which can, e.g., promote tumor cell lysis but not CRS. Thus, bispecific constructs utilizing either a Fab or scFV or a peptide directed to the TCR Vb can, e.g., be used to activate and redirect T cells to promote tumor cell lysis for cancer immunotherapy, without, e.g., the harmful side-effects of CRS associated with anti-CD3e targeting.

### Example 4: On-Target T Cell Mediated Cytotoxicity of Multiple Myeloma (MM) Cells with a Dual-Targeting Antibody Molecule Against BCMA and a T Cell Engager

[1153] This example shows on-target T cell mediated cytotoxicity of multiple myeloma (MM) cells with dual-targeting antibody molecules that recognize a T cell engager, e.g., TCRVb, on T cells and BCMA on MM cells.

[1154] As shown in FIG. 14A, purified human T cells activated with plate-bound anti-TCRVb antibody for 5 days proliferate at a higher rate than purified human T cells activated with plate-bound anti-CD3 (OKT3) antibody. Anti-TCRVb antibody stimulation of T cells resulted in selective expansion of CD45RA+ effector memory CD8+ and CD4+ T cells (TEMRA) cells (FIG. 14B). Both CD8+ and CD4+ Temra cell populations expanded more when stimulated with an anti-TCRVb antibody, compared to unstimulated cells or cells stimulated with an anti-CD3(SP34) antibody. Anti-TCRVb antibodies resulted in delayed secretion of IFN-g by PBMCs stimulated with an anti-TCRVb antibody compared to PBMCs stimulated with anti-CD3 antibodies (FIG. 14C). Additionally, T cells stimulated with anti-TCRVb antibody or anti-CD3 antibodies resulted in comparable lysis of multiple myeloma target cells, as shown in FIG. 14D. As shown in FIGS. 14E-14F, T cells stimulated for 5 days with 100 ng/ml plate-bound an anti-TCRVb antibody, or an anti-CD3 antibody secreted perform and Granzyme B.

[1155] Activation of PBMCs with anti-TCRVb antibody resulted in higher production and/or secretion of IL-2 and/or IL-15 compared to PBMCs activated with an anti-OKT3 antibody (FIG. 15A). Anti-TCRVb antibody activated of PBMCs also resulted in expansion and/or survival, e.g., proliferation of Natural Killer (NK) cells (FIG. 15B). In comparison, PBMCS activated with an anti-OKT3 antibody did not result in NK cell expansion. Further, as described in Example 3, PBMCs activated with an anti-TCRVb antibody did not result in the production of cytokines IL-6, IL-1β and TNF-alpha which are associated with CRS (FIG. 16). These in vitro characterization studies show that in some embodiments, anti-TCRVb antibodies, e.g., activate and/or stimulate, T cells to promote T cell killing as evidenced by target cell lysis, perform secretion and granzyme B secretion, and secretion of IFN-g with, e.g., delayed kinetics.

[1156] Next, the ability of a dual-targeting antibody molecule (Molecule I), which targets BCMA on one arm and TCRVb on the other arm, to target and kill multiple myeloma (MM) cells was tested. Healthy donor PBMCs were co-incubated with the RMPI8226 MM cell line and one of the following dual-targeting antibody molecules: BCMA-TCRVb (Molecule I), BCMA-CD3, or Control-TCRVb; or an isotype control Target cell lysis was then assessed using flow cytometry. As shown in FIG. 17A, the dual-targeting BCMA-TCRVb antibody molecule (Molecule I) resulted in killing of MM cells in vitro.

[1157] The dual-targeting BCMA-TCRVb antibody molecule (Molecule I) was further tested in vivo for its ability to inhibit MM tumor growth in a MM mouse model. The NCI-H929 cell line was injected in NOD-scid IL2rγnull (NSG) recipient mice on Day 0 followed by delivery of PBMCs on Day 9. On Days 12, 15, 18 and 21, the dual-targeting BCMA-TCRVb antibody molecule (Molecule I) was administered via intraperitoneal injection at a dose of 0.5 mg/kg. FIG. 17B shows prevention, e.g., inhibition, of MM tumor growth in vivo with the dual-targeting BCMA-TCRVb antibody molecule (Molecule I). These results demonstrate that in some embodiments the dual-targeting BCMA-TCRVb antibody molecule, e.g., can kill tumor cells, e.g., MM tumor cells, in vitro and in vivo. Accordingly, in some embodiments, a dual-targeting BCMA-TCRVb antibody molecule can be used, e.g., as a therapy for cancer, e.g., a hematological cancer, e.g., MM.

### Example 5: In Vitro Cytotoxicity of a Dual-Targeting Antibody Molecule Against FcRH5 and a T Cell Engager

[1158] This example shows in vitro cytotoxicity on multiple myeloma (MM) cells with a dual-targeting antibody molecule that recognizes a T cell engager, e.g., TCRVb, on T cells and FcRH5 on MM cells. Healthy donor PBMCs or purified T cells were co-incubated with the MOL8M MM cell line and a dual-targeting antibody molecule which targets FcRH5 on one arm and TCRVb on the other arm (Molecule E), or with an isotype control antibody. Target cell lysis was then assessed using flow cytometry. As shown in FIG. 18, the dual targeting FcRH5-TCRVb molecule (Molecule E) resulted in killing of MM cells by both purified T cells or PBMCs. This shows that the dual targeting FcRH5-TCRVb molecule can target and promote killing of MM cells by immune cells, e.g., in PBMCs, including T cells.

### Example 6: Characteristics of Anti-TCR Vβ8a Antibodies

[1159] This Example shows in vitro characterization of anti-TCR Vβ8a antibodies (B-H.1). TCR Vβ8 is also referred to as TCR Vβ 12 (as described in Table 8). Isolated human PBMCs were activated with immobilized (plate-coated) anti-CD3c or anti-TCR Vβ8a at 100 nM, and cell culture supernatants were collected on day 1, 2, 3, 5, 6 and 8 post stimulation. Cytokines (IFNγ, IL-2, TNFα, IL-11 or IL-6) were measured using MSD technology platform (MesoScale Discovery) as described in the manufacturer's protocol.

[1160] As shown in FIGS. 19A-19B, Human PBMCs activated by anti-TCR Vβ8a antibodies (B-H.1) produce similar or reduced levels of IFNγ (FIG. 19A) and higher levels IL-2 (FIG. 19B) when compared to those activated by anti-CD3c antibodies (OKT3 or SP34-2).

[1161] FIGS. 20A-20B show that human PBMCs activated by anti-TCR Vβ8a antibodies (B-H.1) do not produce significant levels of IL-6, or IL1b. Activation of human PBMCs with anti-TCR Vβ8a antibodies (B-H.1) also results in lesser TNFalpha when compared to PBMCs activated by anti-CD3c antibodies (OKT3 or SP34-2) (see FIG. 20C).

[1162] In summary, as shown in Example 3, this Example shows that anti-TCR Vβ8a antibodies can, e.g., preferentially induce expression of T cell cytokines, e.g., IL-2 and IFNg, but not production of cytokines IL-6, IL-1β and TNF-alpha which are associated with “cytokine storms” (and accordingly CRS).

### Example 7: Characteristics of Anti-TCRβV Antibody D Antibody

[1163] This Example describes characterization of anti-TCRβV antibodies which can bind and activate a subset of T cells, but with, e.g., no or markedly reduced, CRS.

[1164] Human PBMCs were isolated from whole blood followed by solid-phase (plate-coated) stimulation with anti-TCR Vβ 12 antibody (Antibody D) or anti-CD3e antibodies (OKT3) at 100 nM. Supernatant was collected on Days 1, 2, 3, 5, or 6 followed by multiplex cytokine analysis for IFNg, IL-2, IL-6, IL-1beta, or TNFalpha. The data was quantified using MSD (Meso Scale Discovery) platform, following the manufacturer's protocol.

[1165] As shown in FIG. 21A, when plate-bound anti-TCR Vβ 12 antibody (Antibody D) or anti-CD3e antibodies (OKT3) were used to activate human PBMCs, the T cell cytokine IFNg was induced. With respect to IL-2 production, PBMCs activated with anti-TCR Vβ 12 antibody (Antibody D) resulted in increased IL-2 production with delayed kinetics (FIG. 21B) as compared to PBMCs activated with anti-CD3e antibodies (OKT3).

[1166] The production of cytokines IL-6, IL-13 and TNF-alpha which are associated with “cytokine storms” (and accordingly CRS) was also assessed under similar conditions. FIGS. 21C-21E show that that while PBMCs activated with anti-CD3e antibodies demonstrate production of IL-6 (FIG. 21D), TNF-alpha (FIG. 21C) and IL-1β (FIG. 21E), no or little induction of these cytokines was observed with PBMCs activated with anti-TCR Vβ 12 antibody (Antibody D).

[1167] The data provided in this Example show that antibodies directed against TCR Vβ can, e.g., preferentially activate a subset of T cells, and do not results in induction of cytokines associated with cytokine storms or CRS.

### Example 8: Characteristics of Anti-TCRβV Antibody E

[1168] This Example describes characterization of anti-TCRβV antibodies which can bind and activate a subset of T cells, but with, e.g., no or markedly reduced, CRS.

[1169] Human PBMCs were isolated from whole blood followed by solid-phase (plate-coated) stimulation with anti-TCR Vβ 5 antibody (Antibody E) or anti-CD3e antibodies (OKT3 and SP34-2), each at 100 nM. Supernatant was collected on Days 1, 3, 5, or 7 followed by multiplex cytokine analysis for IFNg, IL-2, IL-6, IL-1beta, IL-10 or TNFalpha. The data was quantified using MSD (Meso Scale Discovery) platform, following the manufacturer's protocol.

[1170] As shown in FIG. 22A, when plate-bound anti-TCR Vβ 5 antibody (Antibody E) or anti-CD3e antibodies (OKT3 and SP34-2) were used to activate human PBMCs, the T cell cytokine IFNg was induced. With respect to IL-2 production, PBMCs activated with anti-TCR Vβ 5 antibody (Antibody E) resulted in increased IL-2 production with delayed kinetics (FIG. 22B) as compared to PBMCs activated with anti-CD3e antibodies (OKT3 or SP34-2).

[1171] The production of cytokines IL-6, IL-13, IL-10 and TNF-alpha which are associated with “cytokine storms” (and accordingly CRS) was also assessed under similar conditions. FIGS. 23A-23D show that that while PBMCs activated with anti-CD3e antibodies demonstrate production of IL-1β (FIG. 23A), IL-6 (FIG. 23B), TNF-alpha (FIG. 23C) and IL-10 (FIG. 23D), no or little induction of these cytokines was observed with PBMCs activated with anti-TCR Vβ 5 antibody (Antibody E).

[1172] The data provided in this Example show that antibodies directed against TCR Vβ can, e.g., preferentially activate a subset of T cells, and do not results in induction of cytokines associated with cytokine storms or CRS.

### Example 9: Characteristics of a Dual-Targeting Antibody Molecule Against BCMA and TCRβV

[1173] This Example describes characterization of a dual targeting antibody (e.g., a bispecific molecule) comprising an anti-TCRβV binding moiety and a BCMA binding moiety (Molecule H) which can bind and activate a subset of T cells, but with, e.g., no or markedly reduced, CRS.

[1174] Human PBMCs were isolated from whole blood followed by solid-phase (plate-coated) stimulation with an anti-TCRβV x BCMA bispecific molecule (Molecule H) or anti-CD3e antibodies (OKT3), each at 100 nM. Supernatant was collected on Days 1, 2, 3, or 5 followed by multiplex cytokine analysis for IFNg, IL-2, IL-6, IL-1beta, IL-10 or TNFalpha. The data was quantified using MSD (Meso Scale Discovery) platform, following the manufacturer's protocol.

[1175] As shown in FIG. 24A, when plate-bound anti-TCRβV x BCMA bispecific molecule (Molecule H) or anti-CD3e antibodies (OKT3) were used to activate human PBMCs, the T cell cytokine IFNg was induced. With respect to IL-2 production, PBMCs activated with anti-TCRβV x BCMA bispecific molecule (Molecule H) resulted in increased IL-2 production (FIG. 24B) as compared to PBMCs activated with anti-CD3e antibodies (OKT3).

[1176] The production of cytokines IL-6, IL-13, IL-10 and TNF-alpha which are associated with “cytokine storms” (and accordingly CRS) was also assessed under similar conditions. FIGS. 24C-24E show that that while PBMCs activated with anti-CD3e antibodies demonstrate production of IL-1β (FIG. 24C), IL-6 (FIG. 24D), TNF-alpha (FIG. 24D) and IL-10 (FIG. 24E), no or little induction of these cytokines was observed with PBMCs activated with anti-TCRβV x BCMA bispecific molecule (Molecule H).

[1177] The data provided in this Example show that antibodies directed against TCR Vβ can, e.g., preferentially activate a subset of T cells, and do not result in induction of cytokines associated with cytokine storm or CRS.

### Example 10: Cytokine and Chemokine Profile of Anti-TCRVb Antibodies

[1178] This Examples describes cytokines and chemokines secreted by PBMCs following activation by anti-TCR Vβ antibodies.

[1179] Human PBMCs were isolated from whole blood followed by solid-phase (plate-coated) stimulation with an anti-TCRβV antibodies (A-H.1, B-H.1), or a bispecific molecule comprising an anti-TCRVb antibody (Molecule H), an isotype control (BGM0122) or an anti-CD3e antibody (SP34), each at 100 nM. Supernatant was collected on Days 1, 2, 3, 4, 5, 6, 7 and 8 followed by multiplex analysis for the indicated cytokines or chemokines. The data was quantified using MSD (Meso Scale Discovery) platform, following the manufacturer's protocol. BGM0122 comprises the amino acid sequence of

(SEQ ID NO: 3283)
METDTLLLWVLLLWVPGSTGDKTHTCPPCPAPELLGGPSVFLFPPKPKD
TLMISRTPEVTCVVVDVSHEDPEVKFNWYVDGVEVHNAKTKPREEQYNS
TYRVVSVLTVLHQDWLNGKEYKCKVSNKALPAPIEKTISKAKGQPREPQ
VYTLPPSREEMTKNQVSLTCLVKGFYPSDIAVEWESNGQPENNYKTTPP
VLDSDGSFFLYSKLTVDKSRWQQGNVFSCSVMHEALHNHYTQKSLSLSP
GKGGGGSGGGGSGLNDIFEAQKIEWHE.

[1180] FIGS. 26A-26J, FIGS. 27A-27H, and FIGS. 28A-28L show the levels of cytokine and chemokine from PBMCs activated with the indicated antibodies.

[1181] As shown in FIG. 26A, when plate-bound anti-TCR Vβ antibodies or anti-CD3e antibodies (OKT3) were used to activate human PBMCs, the T cell cytokine IFNg was induced. With respect to IL-2 production, PBMCs activated with anti-TCR Vβ antibodies resulted in increased IL-2 production with delayed kinetics (FIG. 26B) as compared to PBMCs activated with anti-CD3e antibody (OKT3).

[1182] While IL-1beta (FIG. 26C), IL-6 (FIG. 26D), IL-10 (FIG. 26E), IL-4 (FIG. 26F), TNFalpha (FIG. 26G), IP-10 (FIG. 27C), IL-12-23p40 (FIG. 28D), IL-17A (FIG. 28G), and IL-1a (FIG. 28H), were induced by anti-CD3e antibody (OKT3), no or little induction of these cytokines or chemokines was observed with PBMCs activated with anti-TCRVb antibodies.

[1183] PBMCs activated with anti-TCR Vβ antibodies demonstrated induction of IL-13 (FIG. 261), IL-8 (FIG. 26J), Eotaxin (FIG. 27A), Eotaxin 3 (FIG. 27B), IL-18 (HA) (FIG. 27C), MCP-1 (FIG. 27E), MCP-4 (FIG. 27F), MDC (FIG. 27G), MIP1a (FIG. 27H), MIP1B (FIG. 28A), TARC (FIG. 28B), GM-CSF (FIG. 28C), IL-15 (FIG. 28E), IL-16 (FIG. 28F), and IL-15 (FIG. 28I), IL-7 (FIG. 28J).

### Example 11: Nanostring-Based Gene Expression Profiling of TCR Vb-Activated T Cells

[1184] This Example describes gene expression profiling of TCR Vβ-activated T cells to, e.g., uncover potential mechanisms or pathways underlying TCR Vβ activation of T cells.

[1185] In a first study, the anti-TCR Vβ 13.1 antibody A-H.1 was compared with an anti-CD3 antibody OKT3. Briefly, human PBMCs were isolated from whole blood. From isolated PBMCs, human CD3+ T cells were isolated using magnetic-bead separation (negative selection) (Miltenyi biotec) and activated by immobilized (plate-coated) anti-TCR Vβ 13.1 antibody (A-H.1) or anti-CD3 antibody (OKT3) at 100 nM for 6 days. Activated T-cells (from plate-coated) were then prepared for gene expression profiling (PanCancer 10 360™ Panel, nanoString), following manufacturer's protocol. Differential gene expression analysis was grouped by anti-TCR Vβ 13.1 (A-H.1) vs anti-CD3 (OKT3) activated T-cells using the nSolver Analysis Software (Nanostring). Data shown in Table 16A are mean values from 3 donors. The differentially regulated genes shown in Table 16A have a p-value of 0.05 or less. In the fourth column of Table 16A showing fold changes in gene expression, a positive value indicates genes that are upregulated at the transcriptional level in TCR Vβ-activated T cells compared to OKT3-activated T cells, whereas a negative value indicates genes downregulated at the transcriptional level in TCR Vβ-activated T cells compared to OKT3-activated T cells.

[1186] In a second study, the multispecific anti-TCR Vβ 13.1/anti-BCMA antibody Molecule H was compared with the anti-CD3 antibody OKT3. Purified T cells were stimulated with solid-phase anti-TCR Vβ antibody over 6 days with the anti-TCR Vβ antibody Molecule H or anti-CD3e antibody (OKT3) at 100 nM. Expanded T cells were collected by centrifugation followed by RNA extraction. Seven hundred and seventy eight (778) immunology-related genes were counted using the nCounter Technology (Nanostring) followed by gene expression analysis using nSolver analysis tools. The data described in this Example is representative of 3 donors.

[1187] Based on this analysis, a panel of genes were identified as being differentially regulated in TCR Vβ-activated T cells compared to OKT3-activated T cells (Table 16B). The differentially regulated genes shown in Table 16B have a p-value of 0.05 or less. For example, LIF, CD40LG, PDCD1, CXCR5, LTA, and CD80 are all upregulated at the transcriptional level in TCR Vβ-activated T cells compared to OKT3-activated T cells. GZMK, ENTPD1 (CD39), TCF7, CD96, HLA-DRB4, SIGIRR and SELL are downregulated at the transcriptional level in TCR Vβ-activated T cells compared to OKT3-activated T cells. TCR Vβ-activated T cells also expressed high levels of cytolytic effectors (e.g., IFNg, Granzyme B and perforin).

TABLE 16A
Summary of genes whose expression are preferentially regulated
in TCR Vβ-activated T cells compared to OKT3-activated T cells.

| | | | TCR Vβ13.1 | |
|---|---|---|---|---|
| | | | vs OKT3 | |
| Probe Name | Accession # | NS Probe ID | Fold Change | P value |
| CCR2 | NM_001123041.2 | NM_001123041.2:743 | −3.06 | 0.00019145 |
| LIF | NM_002309.3 | NM_002309.3:1240 | 21.6 | 0.0003319 |
| TCF7 | NM_003202.2 | NM_003202.2:2420 | −8.38 | 0.00037035 |
| PLA2G6 | NM_001004426.1 | NM_001004426.1:1954 | −2.19 | 0.00043564 |
| CD84 | NM_001184879.1 | NM_001184879.1:28 | −3.81 | 0.00062413 |
| ITGB2 | NM_000211.2 | NM_000211.2:520 | −2.11 | 0.0012003 |
| GZMK | NM_002104.2 | NM_002104.2:700 | −11.09 | 0.00135083 |
| HLA-DRB4 | NM_021983.4 | NM_021983.4:194 | −5.75 | 0.00137591 |
| CCR7 | NM_001838.2 | NM_001838.2:1610 | −2.43 | 0.00165716 |
| PDCD1 | NM_005018.1 | NM_005018.1:175 | 7.24 | 0.00195468 |
| CD96 | NM_005816.4 | NM_005816.4:1355 | −6.44 | 0.00221401 |
| SELL | NR_029467.1 | NR_029467.1:1585 | −5 | 0.00227156 |
| NFATC4 | NM_001136022.2 | NM_001136022.2:2296 | −2.75 | 0.0025171 |
| CD8B | NM_004931.3 | NM_004931.3:440 | −3.56 | 0.00302475 |
| NLRC5 | NM_032206.4 | NM_032206.4:860 | −2.27 | 0.00309164 |
| CD1C | NM_001765.2 | NM_001765.2:750 | 8.62 | 0.0035729 |
| HLA-B | NM_005514.6 | NM_005514.6:937 | −1.81 | 0.00363669 |
| NUP107 | NM_020401.2 | NM_020401.2:1002 | 1.64 | 0.00366886 |
| CD3D | NM_000732.4 | NM_000732.4:110 | −2.05 | 0.00401569 |
| HDAC3 | NM_003883.2 | NM_003883.2:1455 | −1.41 | 0.0042794 |
| PRKCE | NM_005400.2 | NM_005400.2:1695 | −1.86 | 0.00429076 |
| HLA-DQB1 | NM_002123.3 | NM_002123.3:384 | −5.71 | 0.00430297 |
| AKT3 | NM_181690.1 | NM_181690.1:755 | −2.98 | 0.00430433 |
| VCAM1 | NM_001078.3 | NM_001078.3:2535 | −23.93 | 0.00464703 |
| CD53 | NM_001040033.1 | NM_001040033.1:835 | −1.7 | 0.00507702 |
| LRP1 | NM_002332.2 | NM_002332.2:4240 | −2.22 | 0.00508974 |
| CD28 | NM_001243078.1 | NM_001243078.1:2065 | −1.73 | 0.00545641 |
| OSM | NM_020530.4 | NM_020530.4:580 | 8.97 | 0.00558554 |
| CLEC4A | NM_194448.2 | NM_194448.2:388 | −1.7 | 0.0056661 |
| MFGE8 | NM_001114614.1 | NM_001114614.1:328 | −2.75 | 0.00633707 |
| IFNAR2 | NM_000874.3 | NM_000874.3:631 | −3.69 | 0.00659279 |
| LTA | NM_000595.2 | NM_000595.2:885 | 6.53 | 0.00727884 |
| ITGAE | NM_002208.4 | NM_002208.4:3405 | −3.42 | 0.00779862 |
| CXCR5 | NM_001716.3 | NM_001716.3:2618 | 4.38 | 0.00781195 |
| CD6 | NM_006725.3 | NM_006725.3:1280 | −1.38 | 0.00848703 |
| ICOS | NM_012092.2 | NM_012092.2:640 | 1.74 | 0.00914866 |
| NOS2A | NM_153292.1 | NM_153292.1:546 | −2.29 | 0.0095337 |
| CD1A | NM_001763.2 | NM_001763.2:1815 | 5.12 | 0.00956367 |
| CD27 | NM_001242.4 | NM_001242.4:330 | −3.41 | 0.00984676 |
| KLRD1 | NM_002262.3 | NM_002262.3:542 | −6.43 | 0.00998325 |
| TARP | NM_001003799.1 | NM_001003799.1:560 | −3.71 | 0.00998698 |
| HLA-DPB1 | NM_002121.4 | NM_002121.4:931 | −8.85 | 0.01064161 |
| PTPRC | NM_080921.3 | NM_080921.3:258 | −2.86 | 0.01124117 |
| CD44 | NM_001001392.1 | NM_001001392.1:429 | −2.07 | 0.01138242 |
| SLAMF6 | NM_001184714.1 | NM_001184714.1:1032 | −1.81 | 0.00175123 |
| HLA-DMB | NM_002118.3 | NM_002118.3:20 | −6.39 | 0.01184625 |
| CD276 | NM_001024736.1 | NM_001024736.1:2120 | 6.22 | 0.01207813 |
| MAGEA1 | NM_004988.4 | NM_004988.4:476 | −2.93 | 0.01210408 |
| HLA-DMA | NM_006120.3 | NM_006120.3:380 | −5.75 | 0.1210789 |
| EP300 | NM_001429.2 | NM_001429.2:715 | −1.24 | 0.01228626 |
| ADA | NM_000022.2 | NM_000022.2:1300 | −2.97 | 0.01228787 |
| ICAM1 | NM_000201.2 | NM_000201.2:2253 | 2.52 | 0.01290081 |
| SIGIRR | NM_021805.2 | NM_021805.2:469 | −4.46 | 0.01309473 |
| TNF | NM_000594.2 | NM_000594.2:1010 | 4.6 | 0.01318389 |
| IL1RAP | NM_002182.2 | NM_002182.2:460 | 2.77 | 0.01329693 |
| CSF1 | NM_000757.4 | NM_000757.4:823 | 2.55 | 0.01373637 |
| CD40LG | NM_000074.2 | NM_000074.2:1225 | 11.92 | 0.01376174 |
| CYFIP2 | NM_001037332.2 | NM_001037332.2:4043 | −1.38 | 0.01389707 |
| MUC1 | NM_001018017.1 | NM_001018017.1:725 | 3.12 | 0.01399543 |
| HLA-DRB3 | NM_022555.3 | NM_022555.3:698 | −7.11 | 0.01404049 |
| CD2 | NM_001767.3 | NM_001767.3:687 | −1.53 | 0.01432842 |
| IL2RG | NM_000206.1 | NM_000206.1:595 | −1.82 | 0.01477006 |
| HLA-A | NM_002116.5 | NM_002116.5:1000 | −1.96 | 0.01454336 |
| TXK | NM_003328.1 | NM_003328.1:800 | −2.7 | 0.01590341 |
| ITGA4 | NM_000885.4 | NM_000885.4:975 | −3.59 | 0.01601785 |
| DHX16 | NM_001164239.1 | NM_001164239.1:2490 | 1.41 | 0.0167432 |
| CD3E | NM_000733.2 | NM_000733.2:75 | −1.52 | 0.01736902 |
| MR1 | NM_001531.2 | NM_001531.2:7695 | −2.26 | 0.01744764 |
| SMAD3 | NM_005902.3 | NM_005902.3:4220 | −2.82 | 0.01751245 |
| CCRL2 | NM_003965.4 | NM_003965.4:1110 | 1.87 | 0.01834479 |
| HRAS | NM_005343.2 | NM_005343.2:396 | 1.97 | 0.0187379 |
| IL18R1 | NM_003855.2 | NM_003855.2:2025 | 2.36 | 0.01896204 |
| CMA1 | NM_001836.2 | NM_001836.2:561 | −1.96 | 0.01964938 |
| PSMB7 | NM_002799.2 | NM_002799.2:420 | 1.53 | 0.01980367 |
| BCL10 | NM_003921.2 | NM_003921.2:1250 | −1.38 | 0.01981376 |
| HLA-DRA | NM_019111.3 | NM_019111.3:335 | −7.46 | 0.02026993 |
| CD80 | NM_005191.3 | NM_005191.3:1288 | 4.18 | 0.02055337 |
| PIK3CD | NM_005026.3 | NM_005026.3:2978 | −1.23 | 0.02056576 |
| ETS1 | NM_005238.3 | NM_005238.3:4625 | −1.51 | 0.02083359 |
| CHUK | NM_001278.3 | NM_001278.3:860 | 1.67 | 0.0217326 |
| CCL5 | NM_002985.2 | NM_002985.2:280 | −2.47 | 0.02195802 |
| ITGAL | NM_002209.2 | NM_002209.2:3905 | −3 | 0.02244779 |
| TNFRSF18 | NM_004195.2 | NM_004195.2:445 | −3.76 | 0.02330885 |
| EIF2B4 | NM_172195.3 | NM_172195.3:1390 | 1.28 | 0.02349098 |
| CD79A | NM_001783.3 | NM_001783.3:695 | −4.47 | 0.02361746 |
| ABCF1 | NM_001090.2 | NM_001090.2:850 | 1.31 | 0.02452054 |
| CD37 | NM_001774.2 | NM_001774.2:535 | −2.06 | 0.02476513 |
| STAT5B | NM_012448.3 | NM_012448.3:200 | −1.56 | 0.02495121 |
| CSF2 | NM_000758.2 | NM_000758.2:475 | 11.38 | 0.0256982 |
| STAT3 | NM_139276.2 | NM_139276.2:4535 | −1.47 | 0.02629936 |
| GZMA | NM_006144.2 | NM_006144.2:155 | −2.46 | 0.02646368 |
| C1R | NM_001733.4 | NM_001733.4:760 | −3.1 | 0.02653879 |
| MIF | NM_002415.1 | NM_002415.1:319 | −1.38 | 0.02690018 |
| CD46 | NM_172350.1 | NM_172350.1:365 | −1.36 | 0.02725208 |
| PIK3CG | NM_002649.2 | NM_002649.2:2125 | −2.34 | 0.02762105 |
| CFB | NM_001710.5 | NM_001710.5:2029 | −2.59 | 0.02802998 |
| IL3 | NM_000588.3 | NM_000588.3:130 | 13.37 | 0.02820076 |
| TNFRSF13C | NM_052945.3 | NM_052945.3:789 | −2.2 | 0.02835259 |
| MRPS5 | NM_031902.3 | NM_031902.3:390 | 1.2 | 0.02849936 |
| TUBB | NM_178014.2 | NM_178014.2:320 | 1.06 | 0.02874459 |
| PECAM1 | NM_000442.3 | NM_000442.3:1365 | −4.35 | 0.02901845 |
| PVR | NM_006505.3 | NM_006505.3:604 | 2.28 | 0.0299334 |
| AMICA1 | NM_153206.2 | NM_153206.2:620 | −2.38 | 0.03034954 |
| CD74 | NM_001025159.1 | NM_001025159.1:964 | −3.28 | 0.0305419 |
| ENTPD1 | NM_001098175.1 | NM_001098175.1:8830 | −8.02 | 0.03085618 |
| CD97 | NM_078481.2 | NM_078481.2:1370 | −1.56 | 0.03086014 |
| KLRK1 | NM_007360.3 | NM_007360.3:522 | −4.16 | 0.03108504 |
| HLA-DQA1 | NM_002122.3 | NM_002122.3:261 | −5.51 | 0.03126291 |
| CD247 | NM_198053.1 | NM_198053.1:1490 | −1.88 | 0.03182703 |
| IFNG | NM_000619.2 | NM_000619.2:970 | 5.98 | 0.03202586 |
| SAA1 | NM_199161.1 | NM_199161.1:135 | −2.35 | 0.03341258 |
| TBX21 | NM_013351.1 | NM_013351.1:890 | 1.92 | 0.03359165 |
| RORA | NM_134261.2 | NM_134261.2:1715 | −2.57 | 0.03591525 |
| MASP2 | NM_139208.1 | NM_139208.1:330 | −1.65 | 0.03611762 |
| CLU | NM_001831.2 | NM_001831.2:2340 | −1.55 | 0.0369776 |
| KLRB1 | NM_002258.2 | NM_002258.2:85 | −7.43 | 0.03705134 |
| RELA | NM_021975.2 | NM_021975.2:360 | −1.26 | 0.03765981 |
| SLAMF1 | NM_003037.2 | NM_003037.2:580 | 1.82 | 0.03768168 |
| CD8A | NM_001768.5 | NM_001768.5:1320 | −4.49 | 0.0380276 |
| IL11RA | NM_147162.1 | NM_147162.1:400 | −3.54 | 0.03855863 |
| CD3G | NM_000073.2 | NM_000073.2:404 | −1.44 | 0.03877635 |
| JAK1 | NM_002227.1 | NM_002227.1:285 | −1.84 | 0.4001383 |
| SPN | NM_003123.3 | NM_003123.3:2345 | −1.72 | 0.04035383 |
| CXCR4 | NM_003467.2 | NM_003467.2:1335 | −3.03 | 0.04122601 |
| FAS | NM_000043.3 | NM_000043.3:90 | −2.37 | 0.04150638 |
| IL2 | NM_000586.2 | NM_000586.2:300 | 10.9 | 0.04175377 |
| ITGA1 | NM_181501.1 | NM_181501.1:1875 | −2.75 | 0.04213304 |
| IGF1R | NM_000875.2 | NM_000875.2:455 | −1.94 | 0.0424234 |
| CLEC6A | NM_001007033.1 | NM_001007033.1:342 | −2.83 | 0.04299769 |
| RPS6 | NM_001010.2 | NM_001010.2:171 | −1.36 | 0.04334091 |
| MAPK11 | NM_002751.5 | NM_002751.5:1310 | −1.98 | 0.04344288 |
| REL | NM_002908.2 | NM_002908.2:225 | −2.37 | 0.04382344 |
| EOMES | NM_005442.2 | NM_005442.2:1670 | −6.49 | 0.04442535 |
| KLRG1 | NM_005810.3 | NM_005810.3:65 | −3.52 | 0.04487411 |
| IL2RA | NM_000417.1 | NM_000417.1:1000 | 3.4 | 0.0457568 |
| IFNA17 | NM_021268.2 | NM_021268.2:291 | −3.13 | 0.04595868 |
| SH2D1B | NM_053282.4 | NM_053282.4:545 | −1.44 | 0.04640447 |
| CCL2 | NM_002982.3 | NM_002982.3:123 | 4.01 | 0.04660539 |
| TXNIP | NM_006472.1 | NM_006472.1:255 | −4.07 | 0.04695375 |
| CXCL13 | NM_006419.2 | NM_006419.2:210 | −65.05 | 0.04708191 |
| CASP8 | NM_001228.4 | NM_001228.4:301 | −1.42 | 0.04720592 |
| MTMR14 | NM_022485.3 | NM_022485.3:720 | −1.25 | 0.04798024 |
| MAP3K5 | NM_005923.3 | NM_005923.3:1760 | −1.62 | 0.04838454 |
| ADORA2A | NM_000675.3 | NM_000675.3:1095 | 1.3 | 0.04872028 |
| CCR5 | NM_000579.1 | NM_000579.1:2730 | −4.01 | 0.04885927 |

TABLE 16B
Summary of genes whose expression are preferentially regulated
in TCR Vβ-activated T cells compared to OKT3-activated T cells.

| Gene | Description | Log₂ Fold Change | P-Value |
|---|---|---|---|
| LIF | LIF Interleukin 6 Family Cytokine | 4.65 | 0.0119 |
| GZMK | Granzyme K | −3.65 | 0.0468 |
| CD40LG | CD40 Ligand | 3.56 | 0.0082 |
| ENTPD1 (CD39) | Ectonucleoside Triphosphate | −3.53 | 0.0541 |
| | Diphosphohydrolase 1 | | |
| PDCD1 | Programmed Cell Death 1 | 3.19 | 0.0257 |
| TCF7 | Transcription Factor 7 | −3.1 | 0.00634 |
| CXCR5 | Chemokine receptor for CXCL13 | 3.05 | 0.0337 |
| CD96 | Transmembrane glycoprotein Ig superfamily | −2.75 | 0.007 |
| | receptor, interacts with nectin and nectin-like | | |
| | proteins, including CD155/polio virus receptor | | |
| | (PVR) | | |
| LTA | Lymphotoxin Alpha | 2.67 | 0.0082 |
| HLA-DRB4 | Major Histocompatibility Complex, Class II, DR | −2.66 | 0.0377 |
| | Beta 4 | | |
| CD80 | T cell costimulatory molecule | 2.58 | 0.0425 |
| SIGIRR | Single Ig And TIR Domain Containing | −2.37 | 0.0227 |
| SELL | Selection L | −2.3 | 0.00634 |

### Example 12: Binding Affinity of Affinity Matured Humanized Antibody A-H Antibodies

[1188] This Example describes the evaluation of binding affinity of affinity matured humanized Antibody A-H antibodies to recombinant protein TCRVB 6-5.

[1189] Antibody A-H humanized antibodies were affinity matured. The resulting affinity matured antibodies were tested for their binding affinity to TCRVB 6-5 as described below.

[1190] TCRVB 6-5 at 5 μg/mL was immobilized on a Biotin CAP Series S Sensor Chip to 60 RU. BJM0277 was diluted to 200 nM and then serially diluted two fold. Association was 120 seconds, and dissociation was 300 seconds. This assay was run in 1×HBS-EP+ Buffer pH 7.4 and 25 C. The data was fit using a 1:1 binding model.

[1191] TCRVB 6-5 at 5 μg/mL was immobilized on a Biotin CAP Series S Sensor Chip to 60 RU. A-H.45 was diluted to 50 nM and then serially diluted two fold. Association was 120 seconds, and dissociation was 300 seconds. This assay was run in 1×HBS-EP+ Buffer pH 7.4 and 25 C. The data was fit using a 1:1 binding model. A-H.45 is an improved yeast clone (TCRvB/CD19 bispecific) and contains a mutation (G to V) at the last residue in framework 3, just before HCDR3. The affinity is 35-fold greater than the BJM0277 (Table 17).

[1192] TCRVB 6-5 at 5 μg/mL was immobilized on a Biotin CAP Series S Sensor Chip to 60 RU. A-H.52 was diluted to 50 nM and then serially diluted two fold. Association was 120 seconds, dissociation was 300 seconds. This assay was run in 1×HBS-EP+ Buffer pH 7.4 and 25 C. The data was fit using a 1:1 binding model. A-H.52 is a phage clones and is a monovalent scFv. A-H.52 has two mutations on CDRH1. The affinity of A-H.52 is 20-fold greater than BJM0277 (Table 17).

[1193] TCRVB 6-5 at 5 μg/mL was immobilized on a Biotin CAP Series S Sensor Chip to 60 RU. A-H.53 was diluted to 50 nM and then serially diluted two fold. Association was 120 seconds, dissociation was 300 seconds. This assay was run in 1×HBS-EP+ Buffer pH 7.4 and 25 C. The data was fit using a 1:1 binding model. A-H.53 (phage clone) affinity is in the pM range (Table 17). The affinity of A-H.53 is 200-fold greater than BJM0277 (Table 17).

[1194] TCRVB 6-5 at 5 μg/mL was immobilized on a Biotin CAP Series S Sensor Chip to 60 RU. A-H.54 was diluted to 50 nM and then serially diluted two fold. Association was 120 seconds, dissociation was 300 seconds. This assay was run in 1×HBS-EP+ Buffer pH 7.4 and 25 C. The data was fit using a 1:1 binding model. A-H.54 (phage clone) affinity is 17-fold greater than BJM0277 (Table 17).

TABLE 17
Summary of affinity maturation of anti-TCRVb antibodies

| Construct | Target: TCRVβ 6-5 | |
|---|---|---|
| BJM0277 | 35 | nM |
| A-H.45 | 1.08 | Nm |
| A-H.52 | 1.76 | nM |
| A-H.53 | 165 | pM |
| A-H.54 | 2.22 | nM |

### Example 13: Expression and Purification of Antibody Constructs

### Construction of the Plasmids

[1195] The DNA encoding the protein sequences was optimized for expression in Cricetulus griseus, synthesized, and cloned into the pcDNA3.4-TOPO (Life Technologies A14697) using Gateway cloning. All constructs contained an Ig Kappa leader sequence METDTLLLWVLLLWVPGSTG (SEQ ID NO: 3288).

### Expression and Purification

[1196] The plasmids were co-transfected into either Expi293 cells (Life Technologies A14527) or ExpiCHO cells (Life Technologies A29127). Transfections were performed using 1 mg of total DNA for a multispecific construct with a 1:1 heavy chain ratio and 3:2 light chain to heavy chain ratio if applicable. Transfection in Expi293 cells was done using linear 25,000 Da polyethylenimine (PEI, Polysciences Inc 23966) in a 3:1 ratio with the total DNA. The DNA and PEI were each added to 50 mL of OptiMem (Life Technologies 31985088) medium and sterile filtered. The DNA and PEI were combined for 10 minutes and added to the Expi293 cells with a cell density of 1.8-2.8×10⁶ cells/mL and a viability of at least 95%. The ExpiCHO transfection was performed according to the manufacturer's instructions. Expi293 cells were grown in a humidified incubator at 37° C. with 8% CO₂ for 5-7 days after transfection and ExpiCHO cells were grown for 14 days at 32° C. with 5% CO₂. The cells were pelleted by centrifugation at 4500×g and the supernatant was filtered through a 0.2 m membrane. Protein A resin (GE 17-1279-03) was added to the filtered supernatant and incubated for 1-3 hours at room temperature. The resin was packed into a column, washed with 3×10 column volumes of Dulbecco's phosphate-buffered saline (DPBS, Life Technologies 14190-144). The bound protein was eluted from the column with 20 mM citrate, 100 mM NaCl, pH 2.9. When necessary, the proteins were further purified using ligand affinity and/or size exclusion chromatography on a Superdex 200 column with a running buffer of DPBS.

### Example 14: Humanization of Anti-TRBV5-5 Antibody Clone Antibody C

[1197] The germline for the mouse anti-TCRvbeta antibody clone Antibody C VH and VL were assigned using IMGT nomenclature, with CDR regions defined by a combined Kabat and Chothia classification. SEQ ID NO: 232 and SEQ ID NO: 233 are the Antibody C VH and VL sequences respectively where the VH germline is mouse IGHV2-6-7*01 and the VL germline is mouse IGKV10-94*02. The method applied to humanize Antibody A described in Example 1 was used to humanize Antibody C. The Antibody C VH was humanized into human IGHV2-26*01, IGHV2-70*04, IGHV4-4*02, IGHV2-5*09, IGHV2-5*08, IGHV4-34*09, IGHV4-59*01, IGHV4-59*07, IGHV4-61*02, IGHV4-38-2*01, IGHV4-31*01, IGHV3-49*04, IGHV3-49*02, IGHV4-4*07, IGHV3-49*05, IGHV4-34*10, IGHV4-28*04, IGHV3-72*01, IGHV3-15*07, IGHV6-1*01, IGHV3-7*01, IGHV4-34*01, IGHV3-33*02, IGHV3-48*02, IGHV3-23*03, IGHV3-21*01, IGHV3-73*01, IGHV3-30*02, IGHV3-7*01, IGHV3-43*01, and IGHV3-53*03 and the Antibody C VL was humanized into human IGKV1D-43*01, IGKV1-27*01, IGKV1-17*02, IGKV1-17*01, IGKV1-5*01, IGKV4-1*01, IGKV3-7*02, IGKV3-7*01, IGKV2-29*02, IGKV6D-41*01, IGKV2-28*01, IGKV2-40*01, IGKV3-15*01, IGKV2-24*01, IGKV6-21*01, IGKV2D-26*01, and IGKV2D-26*03.

[1198] SEQ ID NOs: 3040-3089 are the Antibody C humanized heavy chains and SEQ ID NOs: 3000-3039 are the Antibody C humanized light chains (as described in Table 10).

### Example 15: Humanization of TRBV10-1, TRBV10-2, and TRBV10-3 Antibody Clone Antibody D

[1199] The germline for the mouse anti-TCRvbeta antibody clone Antibody D VH and VL were assigned using IMGT nomenclature, with CDR regions defined by a combined Kabat and Chothia classification. SEQ ID NO: 3183 and SEQ ID NO: 3184 are the Antibody D VH and VL sequences respectively where the VH germline is mouse IGHV5-6*01 and the VL germline is mouse IGKV4-59*01.

[1200] The method applied to humanize Antibody A described in Example 1 was used to humanize Antibody D. The Antibody D VH was humanized into human IGHV3-30*03, IGHV3-30*02, IGHV3-7*01, IGHV3-21*01, IGHV3-23*04, IGHV3-30*15, IGHV3-48*02, IGHV3-53*04, IGHV3-23*03, IGHV3-53*03, IGHV3-53*01, IGHV3-9*01, IGHV3-30*13, IGHV3-20*01, IGHV3-43D*03, IGHV3-43*02, IGHV3-43*01, IGHV3-53*02, IGHV3-13*01, IGHV3-38-3*01, IGHV3-9*03, IGHV3-64D*06, IGHV3-33*02, IGHV3-11*03, IGHV3-64*02, IGHV3-64*01, IGHV3-64*03, IGHV3-7*01, IGHV3-35*01, IGHV3-13*02, IGHV3-38*02, and IGHV3-38*01 and the Antibody D VL was humanized into human IGKV3-11*01, IGKV1-13*02, IGKV1-9*01, IGKV6-21*01, IGKV1D-43*01, IGKV3-11*01, IGKV3D-11*02, IGKV1-17*03, IGKV3D-20*01, IGKV3-20*01, IGKV1D-16*01, IGKV4-1*01, IGKV2-28*01, IGKV2-40*01, IGKV2-29*02, IGKV2-29*01, IGKV1D-42*01, IGKV2-24*01, and IGKV5-2*01. SEQ ID NOs: 3225-3274 are the Antibody D humanized heavy chains and SEQ ID NOs: 3185-3224 are the Antibody D humanized light chains (as described in Table 12).

### Example 16: Humanization of TRBV5-5 and TRBV5-6 Antibody Clone Antibody E

[1201] The germline for the mouse anti-TCRβ antibody clone Antibody E VH and VL were assigned using IMGT nomenclature, with CDR regions defined by a combined Kabat and Chothia classification. SEQ ID NO: 3091 and SEQ ID NO: 3092 are the Antibody E VH and VL sequences respectively where the VH germline is mouse IGHV1-82*01 and the VL germline is mouse IGKV3-5*01.

[1202] The method applied to humanize Antibody A described in Example 1 was used to humanize Antibody E. The Antibody E VH was humanized into human IGHV1-69*08, IGHV1-3*02, IGHV1-18*03, IGHV1-3*01, IGHV1-18*01, IGHV1-2*06, IGHV1-2*01, IGHV1-2*06, IGHV1-8*01, IGHV7-4-1*02, IGHV1-58*02, IGHV5-51*01, IGHV7-4-1*04, IGHV7-81*01, IGHV5-51*04, IGHV5-51*01, IGHV1-45*03, IGHV3-49*04, IGHV3-49*02, IGHV3-49*05, IGHV4-4*02, IGHV3-49*05, IGHV3-73*01, IGHV4-4*02, IGHV3-15*07, IGHV3-15*02, IGHV3-72*01, IGHV4-59*07, IGHV4-31*01, IGHV4-31*02, IGHV3-30*15, IGHV3-21*01, IGHV3-7*01, IGHV4-28*01, IGHV4-28*02, IGHV3-30*08, IGHV3-30*05, and IGHV3-30*01 and the Antibody E VL was humanized into human IGKV4-1*01, IGKV3-11*01, IGKV3-20*02, IGKV3-11*01, IGKV1-13*02, IGKV3D-11*01, IGKV3D-20*02, IGKV1-13*02, IGKV3D-20*01, IGKV1-9*01, IGKV3D-15*03, IGKV3-15*01, IGKV1-5*01, IGKV2D-29*01, IGKV3-7*02, IGKV1-9*01, IGKV2-28*01, IGKV2-40*01, IGKV2D-29*02, IGKV3-7*01, IGKV2-30*01, IGKV2-24*01, IGKV6D-41*01, IGKV1D-42*01, IGKV2D-26*01, IGKV2D-26*03, and IGKV5-2*01. SEQ ID NOs: 3133-3182 are the Antibody E humanized heavy chains and SEQ ID NOs: 3093-3132 are the Antibody E humanized light chains (as described in Table 11).

### Example 17: Kinetics of T Cell Expansion Following TCRβV 6-5 Stimulation

[1203] To assess the kinetics and absolute count of anti-TCRβv 6-5 expanded T cells—either PBMCs or purified T cells were stimulated with plate-immobilized anti-TCRvb 6-5 antibody over 8 days with a T cell-activating antibody at 100 nM. T cell activating antibodies tested included: i) anti-TCRvb 6-5 v1 antibody; ii) anti-TCRvb 6-5 v2; iii) OKT3 (anti-CD3ε antibody); iv) SP34-2 (anti-CD3ε antibody); and v) IgG1 N297A (isotype control). Cell pellets were collected each day and stained for CD3, CD4, CD8 and TCRvb 6-5 for flow analysis.

[1204] TCRvb 6-5⁺ T cell expansion over 8 days using anti-TCRvb 6-5 v1 is shown in FIG. 31, as assessed by flow cytometry. The data is for a single representative donor; and similar results were seen with PBMCs from two other independent donors. FIG. 33 further shows the specific expansion of TCRvb 6-5+CD4+ T cells and TCRvb 6-5+CD8+ T cells by TCRvb 6-5 v1. In contrast, there was no specific TCRvb 6-5+ T-cell expansion by OKT3 (FIG. 32; FIG. 34).

[1205] FIGS. 35A and 35B show selective expansion of TCRβV 6-5+ T cells in human PBMCs (FIG. 35A) and purified T cells (FIG. 35B).

[1206] FIGS. 36A-38 shows that anti-TCRβV and anti-CD3ε antibodies expand T cells in a PBMC culture (FIGS. 36A and 36B) or a purified T cell culture (FIGS. 37A and 37B)) to comparable levels after 8 days, as measured by both relative count of TCRVB 6-5+ T cells (FIGS. 36A-37B) and relative count of total CD3+ T cells (FIGS. 36A-38).

### Example 18: Activated TCRvb 6-5+ T Cells Exert Cytolytic Function

[1207] To assess the ability of T cells activated/expanded with anti-TCRVβ to mediate tumor cell lysis-purified T cells were stimulated over 6 days with an immobilized T cell-activating antibody at 100 nM. T cell activating antibodies tested included: i) TCRvb 6-5 v1 antibody; ii) OKT3 (anti-CD3ε antibody); or iii) IgG1 N297A (isotype control). Target cells (RPMI-8226 cells) were added on each day and incubated with the activated T cells at an initial effector T cell:target (E:T) cell ratio of 5:1 for 48 hours. Quantification of target cell lysis was measured using CFSE/CD138 and DRAQ7 FACS staining. Three different T cell donors were used (donor 6769, donor 9880, donor 54111). The data shows that the kinetics of target cell lysis by TCRVb 6-5 v1 activated T cells correlates with the expansion of TCRvb 6-5+ T cells (FIG. 39).

[1208] To further assess target cell lysis OKT3 or TCRvb 6-5 v1 antibodies were immobilized (plate-coated) with a ½ log serial dilution from a top dose concentration of 100 nM for purified T-cell (pan CD3 isolated) activation. The purified T-cells were stimulated with the activation plate for 0 (i.e. without antibody preactivation) to 4 (i.e. with antibody preactivation) days prior to addition of the target cells. Target cells (RPMI8226) were added to the activation plate (at an initial E:T cell ratio, 5:1) for up to 6-days (i.e. for plate 0, E:T coculture for 6-days, and for plate 4, E:T coculture for 2-days) followed by target cell lysis quantification via CFSE/CD138 and DRAQ7 FACS staining. The data shows that without T-cell preactivation, approximately 3% of Vb cells were able to kill target cells at day 6 (at higher concentration) (FIG. 40A); and with T-cell preactivation, approximately 25% of Vb cells were able to kill target cells at day 6 (the killing curve is shifted to the left) (FIG. 40B). TCRvb 6-5 v1 activated T cells exhibit comparable maximal target cell lysis when compared to anti-CD3ε when T cells are preactivated for 4 days (FIG. 41). At 100 nM, TCRvb 6-5 v1 activation shows comparable killing of target cells to anti-CD3ε activation (FIG. 42) (preactivation between 4-6 days depending on the donor and the cultures cultured for 48 h in presence of target cells).

### Example 19: Assessing TCRvb Downregulation/Internalization by Anti-TCRvb 6-5 Antibody

[1209] To assess the effect anti-TCRvb 6-5 mediated T cell activation has on cell surface expression of TCRvb-purified T cells were stimulated over 8 days with the indicated T cell-activating antibody at 100 nM (plate bound). T cell activating antibodies included: i) anti-TCRvb 6-5 v1 antibody; or ii) SP34-2 (anti-CD3ε antibody). Cell pellets were collected each day and stained for CD3, CD4, CD8 and TCRβV 6-5 for flow cytometry analysis. A total of three donors were tested, each showing similar results.

[1210] The results show that both anti-CD3ε and anti-TCRvb antibodies activated CD4+ T cells (FIG. 43) and activated CD8+ T cells (FIG. 44) display reduced CD3ε cell surface expression; whereas, TCRvb 6-5 cell surface expression on CD4+ T cells (FIG. 45) and CD8+ T cells (FIG. 46) remains detectable post T cell activation. The results show that the CD3ε subunit is downregulated/internalized in T cells activated by either anti-CD3ε or anti-TCRvb antibodies; while TCRvb 6-5 remains detectable post T cell activation. Additionally, CD4 and CD8 staining did not show any signs of downmodulation of these receptors by either antibody.

### Example 20: Cynomolgus Cross Reactivity of Anti-TCRβV Antibodies

[1211] To assess the cross reactivity of anti-TCRβV antibodies for cynomolgus TCRβV clonotype—fresh and cryopreserved cynomolgus PBMCs were cultured in complete media (RPMI with 10% FBS) in tissue culture treated flat bottom 96 well plates precoated with anti-TCRβV 6-5 v1 or anti-CD3 (antibodies at 100 nM concentration. Negative control or unstimulated wells received PBS alone. TCRβV 6-5 expression was evaluated after 6 days in culture using CytoFlex flow cytometer (Beckmann Coulter) and imaged. Two donors samples were used: Donor DW8N—fresh PBMC sample, male, age 8, weight 7.9 kgs (data presented in FIG. 47A); Donor G709—cryopreserved sample, male, age 6, weight 4.7 kgs (data presented in FIG. 47B). The data show that cynomolgus T cells were activated and expanded by the anti-TCRβV 6-5 v1 (FIG. 47A and FIG. 47B). Fresh cynomolgus PBMCs from donor DW8N that had shown TCRvb 6-5 expansion were cryopreserved and after a week in cryopreservation, the cells were thawed and stimulated using anti-CD34 and anti-TCRvb 6-5 v1 for seven days. Cluster formation and expansion were both reproducible as shown in FIG. 48.

### Example 21: No Activation of γδ T Cells by Anti-TCRβV Antibodies

[1212] To determine if anti-TCRvb antibodies are able to activate γδ T cells—γδ T cells were purified from human PBMCs via magnetic bead separation. γδ T cells were immobilized on plate-coated anti-CD3ε (SP34-2) or anti-TCRvb 6-5 (anti-TCRvb 6-5 v1) antibodies for 24 hours and analyzed for CD69 and CD25 expression by flow cytometry. Supernatants were collected post activation 2, 5, and 7 days, and analyzed for cytokines using Meso Scale Discovery (MSD) assay. FACS gating/staining on PBMCs was conducted prior to γδ T cell purification showing that γδ T cells are vβ 6-5 negative (Donor 12657-gating for γδ T and TCRvβ 6-5 based on FMO) (FIG. 49). FACS gating/staining on purified γδ T cell was conducted showing that purified γδ T cells are vβ 6-5 negative (Donor 12657—gating for γδ T and TCRvβ 6-5 based on FMO) (FIG. 50). As shown in FIG. 51, the anti-TCR Vβ 6-5 antibody (anti-TCRvb 6-5 v1) did not activate γδ T cells; while the anti-CD3ε antibody (SP34-2) did. The cytokine analysis showed that anti-TCRβV 6-5 v1 does not induce cytokine release by γδ T cells, cytokines analyzed include IFNγ, TNFα, IL-2, IL-17A, IL-1a, IL-1β, IL-6, and IL-10 (FIG. 52A-56H).

### Example 22: Polyclonal T Cell Expansion by Anti-TCRVβ Antibodies

[1213] To assess the ability of anti-TCRVβ antibodies to induce polyclonal T cell expansion—human CD3+ T cells were isolated using magnetic-bead separation (negative selection) and activated with immobilized (plate-coated) anti-TCRβV 6-5 v1 at 100 nM for 6 days. The expanded T cell population was washed and lysed using Takara single cell lysis buffer for SMART(er) TCR cDNA synthesis and sequencing. TCR sequencing was carried out and absolute counts and relative representation of the different TCR alpha V and J segments and TCR beta V, D, and J segments were determined, as well as the different variants of each of them that arise from Artemis/TdT activity during the V(D)J recombination, and that correspond to unique clones of T cells. FIG. 53 shows the relative representations of all TCR alpha V segments (TRAV group of genes) and their variants (top), all TCR beta V segment 6-5 variants (TRBV6-5 gene) (bottom left), and all TCR beta V segments and variants excluding 6-5 (bottom right). The data show that the anti-TCRVβ antibody stimulation does not induce proliferation of specific T cell clones within the TRBV6-5 positive population, as the relative difference in clonal representation in that population is comparable to the TRBV6-5 negative population as well as total TRAV usage.

### Example 23: T Cells Expanded by Anti-TCRβV Represent a Novel Subset of Recently Activated Effector T Cells

[1214] To assess the phenotype of anti-TCRβV expanded T cells—purified T cells were stimulated with solid-phase anti-TCRβV antibody over 8 days with the indicated T cell-activating antibody at 100 nM: i) anti-TCRvb 6-5 v1 antibody; ii) anti-TCRvb 6-5 v2; iii) OKT3 (anti-CD3ε antibody); or iv) IgG1 N297A (isotype control). T-cell subsets were identified by FACS staining for specific surface markers for: Naive T cell (CD4/CD8+, CD45RA+, CCR7+); T stem cell memory (TSCM; CD4/CD8+, CD95+, CD45RA+, CCR7+); T central memory (TCM; CD4/CD8+, CD95+, CD45RA−, CCR7+); T effector memory (TEM; CD4/CD8+, CD95+, CD45RA−, CCR7−); T effector memory re-expressing CD45RA (TEMRA; CD4/CD8+, CD95+, CD45RA+, CCR7−); and CD27, CD28, 4-1BB, OX40, and ICOS. Data is representative of more than 5 independent experiments.

[1215] The data shows that CD4+ T cells expanded by anti-TCR Vβ antibody (FIG. 54A), but not OKT3 (FIG. 54B), share phenotypic markers with the T_{EM}RA subset. Likewise, the data shows that CD4+ T cells expanded by anti-TCR Vβ antibody (FIG. 55A), but not OKT3 (FIG. 55B), share phenotypic markers with the T_{EM}RA subset. Further analysis of PD1 expression showed anti-TCR Vβ activated CD4+ T cells (FIG. 56A) and CD8+ T cells (FIG. 56B) display increased PD1 expression relative to anti-CD3ε activated CD4+ T cells (FIG. 56A) and CD8+ T cells (FIG. 56B). These anti-TCR Vβ activated CD4+ T cells (FIG. 57A) (PD-1+ TEMRA phenotype) and anti-TCR Vβ activated CD8+ T cells (FIG. 57B) (PD-1+ TEMRA phenotype) show Ki-67 enriched phenotype relative to anti-CD3ε activated CD4+ T cells (FIG. 57A) and CD8+ T cells (FIG. 57B).

[1216] Further analysis of CD57 expression showed anti-TCR Vβ activated CD8+ T cells (FIG. 58A) do not display increased CD57 expression relative to anti-CD3ε activated CD8+ T cells (FIG. 58B). Likewise, analysis of CD27 and CD28 expression showed anti-TCR Vβ activated CD4+ T cells (FIG. 59 top) and anti-TCR Vβ activated CD8+ T cells (FIG. 59 bottom) do not display increased CD27 and CD28 expression relative to anti-CD3ε activated CD8+ T cells (FIG. 59).

[1217] Further analysis of OX40, 41BB, and ICOS expression showed anti-TCR Vβ activated CD4+ T cells (FIG. 60 top) and anti-TCR Vβ activated CD8+ T cells (FIG. 60 bottom) display increased OX40, 41BB, and ICOS expression relative to anti-CD3ε activated CD8+ T cells (FIG. 60).

[1218] The TEMRA like phenotype of anti-TCR Vβ antibody expanded T cells was further analyzed using time lapse flow cytometry to evaluate expression of CD45RA and CCR7 at different time points post activation. Isolated human T-cells were activated with immobilized (plate-coated) anti-CD3ε or anti-TCR Vβ at 100 nM for between 1-8-days. After each (1, 2, 3, 4, 5, 6, 8-) day activation, T-cell subsets were identified by FACS staining for surface markers for Naïve/TSCM T cell (CD4+/CD8+, CD45RA+, CCR7+), T central memory (TCM; CD4+/CD8+, CD95+, CD45RA−, CCR7+), T effector memory (TEM; CD4+/CD8+, CD95+, CD45RA−, CCR7−), and T effector memory re-expressing CD45RA (TEMRA; CD4+/CD8+, CD95+, CD45RA+, CCR7−). TCRβV+ T-cells are identified by TCR Vβ+ staining. FACS stained samples were analyzed by flow cytometry analysis. Data shown a representative for CD4+ T-cells from 1 of 3 donors.

[1219] FIG. 61 shows a series of FACS plots showing the percentage of CD3+(CD4 gated) TCRβV 6-5+ T cells 1, 2, 3, 4, 5, 6, and 8 days port activation with BCMA and the anti-TCR Vβ antibody anti-TCR V3 6-5 v1. Analysis of the percentage of CD4+ T cells expanded using isotype control (IgG1 N297A), anti-TCRβV (anti-TCR V3 6-5 v1), or anti-CD3ε (OKT3) antibodies on day 0 post activation (FIG. 62A), day 1 post activation (FIG. 62B), day 2 post activation (FIG. 62C), day 3 post activation (FIG. 62D), day 4 post activation (FIG. 62E), day 5 post activation (FIG. 62F), day 6 post activation (FIG. 62G), and day 8 post activation (FIG. 62H). The percentage of TEMRA like T cells expressing both CD45RA and CCR7 shows an increase in the population of TEMRA like cells in the CD4+ TCR Vβ 6-5+ T cell cultures expanded with the anti-TCR Vβ 6-5 v1 antibody compared to those expanded with the OKT3 antibody. Similar results were seen with CD8+ T cells. The results further show that purified human T-cells activated by anti-TCRβV 6-5 directly differentiates to TEMRA subsets and proliferate when compared to purified T-cells activated by anti-CD3ε (OKT3).

[1220] In summary, the data shows anti-TCRβV antibodies activated and expanded T cells represent a novel subset of recently activated effector T cells which share phenotypic markers with T_{EMRA}. This is in contrast to anti-CD3e-expanded T cells which differentiated into T_{CM} and T_{EM}. TCRβV expanded T cells are highly proliferative and do not upregulate the senescent marker CD57 OX40, 4-1BB, and ICOS are upregulated on anti-TCRβV activated T cells.

### Example 24: Metabolic State of αTCRβV Activated T Cells

[1221] To evaluate the metabolic phenotype of T cells activated with αTCRβV antibodies—naïve T cells from PBMCs were stimulated and expanded for 5 days with plate-bound anti-CD3 antibody (OKT3) or anti-TCRβV antibody (anti-TCRβV 6-5 v1 antibody). Activated T cells were then rested in IL-2 containing media for 2 days, before they were cryopreserved. Prior to assay setup, cells were thawed and re-stimulated for 3 days with plate-bound anti-CD3 Ab (clone OKT3) or anti-TCRβV antibody (anti-TCRβV 6-5 v1 antibody), respectively. Equal numbers of live cells were plated on a Seahorse cartridge, and the Real-Time ATP Rate Assay was performed according to manufacturer's instructions. The data showed that ATP production from glycolysis (FIG. 63A) oxidative phosphorylation (FIG. 63B) in T cells from 3 donors (representative results from a single donor presented in FIG. 63A-67B) activated with the anti-TCRβV 6-5 v1 antibody increased compared to T cells activated with the OKT3 antibody (3-fold increase in ATP production was observed on average); and one donor showed equal levels of ATP production in anti-TCRβV 6-5 v1 and OKT3 Ab stimulated cells (data not shown).

[1222] The increased mitochondrial respiration in T cells activated with anti-TCRβV 6-5 v1 antibody compared to T cells activated with the OKT3 antibody is further shown in FIG. 64, which shows the oxygen consumption rate (OCR) of T cells from about 0 to 75 minutes activated with the indicated antibody. Data in FIG. 63 is from a single donor; a second donor tested showed equal levels of ATP production in anti-TCRβV 6-5 v1 and OKT3 Ab stimulated cells (data not shown). FIGS. 65A-65C show the oxygen consumption rate (OCR) of T cells activated with the indicated antibody during basal respiration (FIG. 65A), maximal respiration (FIG. 65B), and spare respiratory capacity (FIG. 65C). Cells were plated in media containing glucose and glutamine to measure basal OCR. FCCP (ETC accelerator) was added to the cell culture medium to determine maximum respiratory capacity/max OCR. Antimycin A & Rotenone (ETC inhibitor) were added to the cell culture medium to determine spare respiratory capacity and non-mitochondrial oxygen consumption. The data presented in FIGS. 65A-65C α-TCRβV 6-5 v1 activated T cells had significantly increased basal respiration, maximal respiration, and spare respiratory capacity compared to α-CD3 (OKT3) activated T cells (data from a single donor). A second donor was tested which showed equal levels of ATP production in anti-TCRβV 6-5 v1 and OKT3 Ab stimulated cells (data not shown). FIG. 65D indicates the areas of basal respiration and maximal respiration as shown in FIG. 64A and FIG. 64B, respectively.

[1223] In order to determine if the observed increase in metabolism due to differences in T cell stimulation, or is it intrinsic to the differentiation stage of T cells activated with anti-TCRβV antibodies TCRβV 6-5+ T cells were expanded for 5 days with plate-bound anti-TCRβV 6-5 v1 Ab. Cells were then rested in IL-2 containing media for 2 days and cryopreserved. Upon thawing, cells were re-stimulated with anti-TCRβV 6-5 v1 for 3 days. Cells were then counted and equal numbers of live cells were re-seeded and stimulated with plate-bound anti-CD3 Ab (clone OKT3) or anti-TCRβV 6-5 v1, respectively, for 24 hours. Equal numbers of live cells were plated on the Seahorse cartridge and the Real-Time ATP Rate Assay was performed.

[1224] The results show that ATP production by glycolysis (FIG. 66A) and oxidative phosphorylation (FIG. 66B) by T cells activated with anti-TCRβV 6-5 v1 is significantly increased upon re-stimulation with α-CD3 antibody OKT3 versus α-TCRβV 6-5 v1 antibody. The observed increase in metabolism of T cells activated with anti-TCRβV 6-5 v1 appears to be due to intrinsic differences upon differentiation into these cells. T cells activated with anti-TCRβV 6-5 v1 have an increased metabolism compared to CD3− activated T cells, which can be further enhanced with strong T cell stimulation via OKT3.

[1225] In summary, the results show that T cells activated with anti-TCRβV antibodies have a metabolic memory phenotype. The cells are not metabolically exhausted, because exhausted T cells have a decreased metabolism. α-TCRβV 6-5 v1-stimulation induces a T cell differentiation stage, which is highly metabolically active, indicative of an effector memory phenotype. This metabolic phenotype is maintained when these cells are re-stimulated with other T cell engagers (OKT3).

### Example 25: Assessment of CRS with Anti-CD3e Antibody Compared to Anti-TCRβV Antibody

[1226] To determine CRS effect of a low affinity (Teneobio) anti-CD3e antibody, a cytokine release assay (CRA) with PBMCs was used. Briefly, PBMCs from two donors were stimulated with plate-coated antibodies: anti-TCRvb6-5 v2, anti-CD3e (SP34) or Teneobio's anti-CD3e antibody. T cell activating antibodies were tested at 100 nM, the highest concentration previously shown not to induce CRS cytokines in this assay. Supernatants were collected at day 1, 3, 5 and 7. Cytokine secretion measurement (IFN-g, IL-10, IL-15, IL-17A, IL-1a, IL-1b, IL-2, IL-4, IL-6 and TNF-a) was detected using MSD analysis. The data show results from two donors.

[1227] FIGS. 67A-67F show that a reduced affinity anti CD3e antibody (TeneoBio) induces expression of IFNgamma, TNFalpha, IL-1a, IL-1b, IL-6 (CRS and neurotoxicity associated cytokines) similar to the SP34-2 anti CD3e antibody. In contrast, the anti-TCRvb6-5 v2 as described herein does not induce CRS or neurotoxicity associated cytokines.

[1228] In summary the data shows that Tenebio's anti-CD3e antibody induces cytokines associated with CRS and neurotoxicity in this highly sensitive PBMC CRA. Thus, Tenebio's anti-CD3e antibody has potential to induce CRS and NT as seen with SP34-based T cell-redirecting bispecific molecules. The anti-TCRvb6-5 as described herein does not induce CRS- and NT-associated cytokines in this assay, suggesting that in some embodiments, TCRvb6-5 based antibodies may be amenable to administration at higher doses and avoid MABEL (minimum anticipated biologic effect level) dosing regimen required for current CD3e-based bispecific molecules.

### Example 26: Anti-TCRβV Stimulated PBMC Mediated Stimulation of NK Cell Expansion

[1229] To assess whether anti-TCRβV stimulated PBMCs mediate expansion of NK cells in vitro—human PBMCs were stimulated with 100 nM of plate-coated anti-TCRβV 6-5 v1 anti-CD3e (OKT3 and SP34-2) for up to 7 days. NK cells were identified via FACS staining for CD3−/CD56+/CD16+/NKp46+ populations. NK cell count was determined by a constant μl sample (presented as relative count for each donor). NK cell-mediated target cell lysis was determined 6-days post stimulation, in which PBMCs were harvested and co-cultured with K562 target cells for 4 hours to determine cell killing, via DRAQ7 viability FACS staining.

[1230] The results show that anti-TCRβV stimulation increases NK cell numbers compared to OKT3 stimulation (FIG. 68; FIG. 69). FACS CFSE staining further shows NK cell proliferation (FIG. 70). FIG. 71 and FIG. 72 show NK cell mediated lysis of target K562 cells. In summary, anti-TCRβV 6-5 antibody induces expansion of NK cells in PBMC; and this effect is unlikely to be mediated through the FcR on NK cells as anti-CD3ε antibodies did not expand NK cells. Expanded NK cells by anti-TCRβV 6-5 v1 mediate potent target cell (K562) lysis in vitro.

[1231] In addition to the experiments conducted above using the anti-TCRβV 6-5 v1 antibody, similar experiments were carried out using anti-TCRβV antibodies that recognize different clonotypes. In one experiment, the anti-TCRβV 12 antibodies: anti-TCRvβ 12-3/4 v1, anti-TCRvβ 12-3/4 v2, and anti-TCRvβ 12-3/4 v3 were used to activate/expand PBMCs using solid-phase stimulated (plate-coated) with the indicated T cell-activating antibody at 100 nM for 6 days as described above. Flow analysis was performed for NK cells using NKp46 and CD56 (CD3 negative). Data was generated from 3 donors and representative of 1 independent experiments.

[1232] Activation/expansion of the PBMCs with isotype control or the anti-CD3ε antibody OKT3 or SP34-2 did not induce expansion of NK cells (FIG. 73; FIG. 75). However, activation/expansion of PBMCs with anti-TCRvβ 12-3/4 v1 (FIG. 74), anti-TCRvβ 12-3/4 v2 (FIG. 74), and anti-TCRvβ 12-3/4 v3 (FIG. 75) all induced NK cell expansion. In summary, the data shows that anti-TCRvb 12 antibodies are able to induce indirect expansion of NK cells from PBMC cultures in vitro.

### Example 27: Concentration Response to Anti-TCRβV Stimulation In Vitro

[1233] Human PBMCs were solid-phase stimulated (plate-coated) with the indicated T cell-activating antibody at the indicated different concentrations: i) anti-TCRvb 6-5 v1 antibody; ii) OKT3 (anti-CD3ε antibody); or iii) SP34-2 (anti-CD3ε antibody). Supernatant were collected on day 1, day 3 and day 5 and cytokines quantified by using Meso Scale Discovery (MSD) assay. The production of cytokines IFNγ (FIG. 76), IL-2 (FIG. 77), IL-15 (FIG. 78), IL-1β (FIG. 79), IL-6 (FIG. 80), and IL-10 (FIG. 81) was analyzed. The results indicate that the lack of CRS associated cytokine induction by T cells activated with an anti-TCRvb is not a result of inhibition or toxicity due to high antibody concentrations.

### Example 28: T Cells Activated by Anti-TCRβV Antibodies have a Distinct Cytokine Release Profile Compared to T Cell Activated with Anti-CD3c Antibodies

[1234] To assess the cytokine release profile of T cells activated/expanded using anti-TCRβV antibodies as compared to anti-CD3ε antibodies—PBMCs were cultured in cell culture plates coated with the immobilized anti-TCRβV antibody anti-TCRβV 6-5 v1 or an anti-CD3ε antibody, either OKT3 or SP37-2. The cells were cultured for 1-8 days, the supernatant collected, and cytokines analyzed using Meso Scale Discovery (MSD) assay. T cells samples from numerous different human donors were tested.

[1235] FIG. 82 shows a summary of data from 17 donors. The highest overall cytokine secretion from time points (day 3 and beyond) was used for further analysis. Each data point was normalized against the highest secretion for each donor and showed as relative % of highest (at a confidence interval of 0.95 percentile). The data shows that T cells activated/expanded with an anti-TCRβV antibody as compared to anti-CD3ε antibody release less IFNγ, TNFα, IL-1β, IL-4, IL-6, IL10, and IL-17; while releasing an increased amount of IL-2 (FIG. 82).

[1236] A series of experiments using the methods previously described, but varying the culture period were conducted with PBMCs from different donors. In one experiment, PBMCs from four different donors were cultured in plates coated with immobilized anti-TCRβV antibody anti-TCRβV 6-5 v1 or an anti-CD3ε antibody, either OKT3 or SP37-2 for 1-6 days. The data confirms that T cells activated/expanded with an anti-TCRβV antibody as compared to anti-CD3ε antibody release lower levels of IFNγ (FIG. 83A), IL-1β (FIG. 83B), IL-4 (FIG. 83C), IL-6 (FIG. 83D), IL10 (FIG. 83E), and TNFα (FIG. 83F); and higher levels of IL-2 (FIG. 83G).

[1237] In a second experiment, PBMCs from six different donors were cultured in plates coated with immobilized anti-TCRβV antibody, either anti-TCRβV 6-5 v1 or anti-TCRβV 6-5 v1; or an anti-CD3ε antibody, either OKT3 or SP37-2 for 1-6 days, or isotype control. The data confirms that T cells activated/expanded with an anti-TCRβV antibody as compared to anti-CD3ε antibody release lower levels of IFNγ (FIG. 84A), IL-1β (FIG. 84B), IL-4 (FIG. 84C), IL-6 (FIG. 84D), IL10 (FIG. 84E), and TNFα (FIG. 84F); and higher levels of IL-2 (FIG. 84G).

[1238] In a third experiments, PBMCs from three different donors were cultured in plates coated with immobilized anti-TCRβV antibody, either anti-TCRβV 6-5 v1 or anti-TCRβV 6-5 v1; or an anti-CD3ε antibody, either OKT3 or SP37-2 for 1-8 days, or isotype control. The data confirms that T cells activated/expanded with an anti-TCRβV antibody as compared to anti-CD3ε antibody release lower levels of IFNγ (FIG. 85A), IL-1β (FIG. 85B), IL-4 (FIG. 85C), IL-6 (FIG. 85D), IL10 (FIG. 85E), and TNFα (FIG. 85F); and higher levels of IL-2 (FIG. 85G).

[1239] In a fourth experiments, PBMCs from two different donors were cultured in plates coated with immobilized anti-TCRβV antibody, either anti-TCRβV 6-5 v1 or anti-TCRβV 6-5 v1; or an anti-CD3ε antibody, either OKT3 or SP37-2 for 2-7 days, or isotype control. The data confirms that T cells activated/expanded with an anti-TCRβV antibody as compared to anti-CD3ε antibody release lower levels of IL-17A (FIG. 86A). In a fifth experiments, PBMCs from four different donors were cultured in plates coated with immobilized anti-TCRβV antibody, either anti-TCRβV 6-5 v1 or anti-TCRβV 6-5 v1; or an anti-CD3ε antibody, either OKT3 or SP37-2 for 2-8 days, or isotype control. The data confirms that T cells activated/expanded with an anti-TCRβV antibody as compared to anti-CD3ε antibody release lower levels of IL-17A (FIG. 86B). In a sixth experiments, PBMCs from two different donors were cultured in plates coated with immobilized anti-TCRβV antibody, either anti-TCRβV 6-5 v1 or anti-TCRβV 6-5 v1; or an anti-CD3ε antibody, either OKT3 or SP37-2 for 2-7 days, or isotype control. The data confirms that T cells activated/expanded with an anti-TCRβV antibody as compared to anti-CD3ε antibody release lower levels of IL-17A (FIG. 86C). In a seventh experiments, PBMCs from two different donors were cultured in plates coated with immobilized anti-TCRβV antibody, either anti-TCRβV 6-5 v1 or anti-TCRβV 6-5 v1; or an anti-CD3ε antibody, either OKT3 or SP37-2 for 2-7 days, or isotype control. The data confirms that T cells activated/expanded with an anti-TCRβV antibody as compared to anti-CD3e antibody release lower levels of IL-17A (FIG. 86D).

[1240] A series of similar experiments were conducted using the TCRβV antibody anti-TCRβV 6-5 v1 or anti-TCRvb 12-3/4 v1 to further assess the cytokine release profile of T cells activated/expanded using anti-TCRβV antibodies as compared to anti-CD3ε antibodies. As described above, PBMCs were cultured in cell culture plates coated with the immobilized anti-TCRβV antibody, anti-TCRβV 6-5 v1 or anti-TCRvb 12-3/4 v1; or an anti-CD3ε antibody, either OKT3 or SP37-2; isotype control; or anti-TCRβV 6-5 v1 in combination with. The cells were cultured for 1-8 days, the supernatant collected, and cytokines analyzed using Meso Scale Discovery (MSD) assay. Data generated from 2 donors and representative of 2 independent experiments.

[1241] The data confirmed that T cells activated/expanded by either anti-TCRβV antibody, anti-TCRβV 6-5 v1 or anti-TCRvb 12-3/4 v1, as compared to either anti-CD3ε antibody (OKT3 or SP37-2) secreted a lower level of IFNγ (FIG. 87A), IL-1β (FIG. 87B), IL-4 (FIG. 87C), IL-6 (FIG. 87D), IL10 (FIG. 87E), TNFα (FIG. 87F); and higher levels of IL-2 (FIG. 87G). Secretion of IL-12p70 (FIG. 87H), IL-13 (FIG. 87I), IL-8 (FIG. 87J), Exotaxin (FIG. 87K), Exotaxin-3 (FIG. 87L), IL-8 (FIG. 87M), IP-10 (FIG. 87N), MCP-1 (FIG. 87O), MCP-4 (FIG. 87P), MDC (FIG. 87Q), MIP-1a (FIG. 87R), MIP-1b (FIG. 87S), TARC (FIG. 87T), GMCSF (FIG. 87U), IL-12-23p40 (FIG. 87V), IL-15 (FIG. 87W), IL-16 (FIG. 87X), IL-17a (FIG. 87Y), IL-1a (FIG. 87Z), IL-5 (FIG. 87AA), IL-7 (FIG. 87BB), TNF-β (FIG. 87CC), and VEGF (FIG. 87DD), were also tested.

[1242] In addition to determining the cytokine profile of T cells activated with the αTCRβV antibodies αTCRβV 6-5 v1 and αTCRβV 6-5 v2 (described above); the assays were conducted with additional αTCRβV antibodies recognizing different clonotypes.

[1243] In one series of experiments antibodies tested included anti-TCRvb 12-3/4 v1, anti-TCRvb 10, and anti-TCRvb 5. Per the protocol described above, human PBMCs were solid-phase stimulated (plate-coated) with the indicated T cell-activating antibody (anti-TCRvb 12-3/4 v1, anti-TCRvb 10, anti-TCRvb 5, or the anti-CD3ε antibody SP34) at 100 nM. Supernatant were collected on day 1 to day 8; and cytokines were quantified using Meso Scale Discovery (MSD) assay. FIG. 88 provides a graphical representation of sequences between the different clonotypes, highlighting the four subfamilies tested in this series of experiments. PBMCs activated/expanded with the anti-TCRvb 12-3/4 v1 antibody (FIG. 89A), anti-TCRvb 10 antibody (FIG. 89B), or anti-TCRvb antibody (FIG. 89C) exhibited lower levels of secretion of cytokines associated with cytokine release syndrome, including IFNγ, TNFα, IL-1β, IL-2, IL-6, and IL-10, as compared to PBMCs activated/expanded with the anti-CD3ε antibody SP34-2.

[1244] In a second series of experiments, antibodies tested included the anti-TCRVβ antibodies: BJ1460, BJ1461, BJ1465, BJ1187, BJM1709; the anti-CD3ε antibody OKT3, and a cell only control. At Day-0 PBMCs from donor 10749 were thawed and counted along with PBMCs from two fresh donors (13836 and 14828). 200,000 PBMCs in 180 μL of X-vivo media/well (1×10e6 cells/mL) was added to a round bottom 96 well plate—one donor for ⅓ of the plate. 20 uL of 10×TCRVβ antibodies at 100 nM or 15 μg/mL were added to the wells of the plate and one triplicate of wells was added with cells only. The pate was kept in a 37° C. incubator with 5% CO₂. The cells were stimulated for 3 days with a selected antibody and 50 μL of supernatant harvested from the plate and stored at −20° C. 50 μL of media was added back to each well and the plate kept in a 37° C. incubator with 5% CO₂. On Day-6 50 μL of supernatant was harvested from each well of the plate and stored at −20° C. The cells from two wells out of the triplicate were combined and media replenished with huIL-2 was added the cell suspension for each donor was transferred into a 12-well plate. The cells were incubated overnight to allow for rest and expansion in IL-2. The cells were subsequently stained for specific Vβ-clones for detection of specific Vβ-clone expansion by FACS analysis. The concentration of cytokines (including IFNγ, IL-10, IL-17A, IL-1α, IL-1β, IL-2, IL-6, and TNFα) in the media were analyzed in the Day-3 and Day-6 supernatant samples using Meso Scale Discovery (MSD) assay. The data confirmed that PBMCs cells activated/expanded using any of the anti-TCRβV antibodies—BJ1460, BJ1461, BJ1465, BJ1187, BJM1709—secreted lower levels of IFNγ (FIG. 90A), IL-10 (FIG. 90B), IL-17A (FIG. 90C), IL-1α (FIG. 90D), IL-1β (FIG. 90E), IL-6 (FIG. 90F), TNFα (FIG. 90G); and higher levels of IL-2 (FIG. 90H). FACS analysis further showed expansion of T cells expressing the indicated TCRVβ clones (FIG. 91).

[1245] In a third series of experiments, antibodies tested included the anti-TCRVβ antibodies: BHM1675, BJM0816, BJ1188, BJ1189, BJ1190; and the anti-CD3ε antibody SP34-2. The indicated antibodies were coated into a 96-well round bottom plate at concentration of 100 nM or 15 μg/mL at 200 μl/well in PBS at 4° C. overnight or at 37° C. for a minimum of 2 hours. The plate was washed the next day with 200 μL of PBS and 0.2×10\hat{ }6 PBMCs/well from donors: CTL_123, CTL_323 and CTL_392. Supernatant samples were collected on days 1, 3, 5, and 7. A 10-plex Meso Scale Discovery (MSD) assay was run on the supernatants to determine the concentration of cytokines (including IFNγ, IL-10, IL-17A, IL-1α, IL-1β, IL-6, IL-4, and IL-2). After day 7, cells were pelleted and added to culture medium supplemented with IL-2 for one additional day to allow for expansion. Expansion of T cells expressing TCRVβ clones was analyzed by FACS staining using the same activating antibody followed by a secondary anti-human/mouse FITC antibody. Live/Dead, CD4+ and CD8+ T cells were also stained for using BHM1675, BJM0816, BJ1189 and BJ1190 antibodies. The data confirmed that PBMCs cells activated/expanded using any of the anti-TCRβV antibodies—BHM1675, BJM0816, BJ1188, BJ1189, BJ1190—secreted lower levels of IFNγ (FIG. 92A), IL-10 (FIG. 92B), IL-17A (FIG. 92C), IL-1α (FIG. 92D), IL-1β (FIG. 92E), IL-6 (FIG. 92F), IL-4 (FIG. 92G); and higher levels of IL-2 (FIG. 92H). FACS analysis further showed that TCRVβ sub-clone T-cells are expanded by their respective activation antibody (FIG. 93).

[1246] In a fourth series of experiments, antibodies tested included the anti-TCRVβ antibodies: BJ1538, BJ1539, BJ1558, BJ1559, BHM1709; and the anti-CD3ε antibody OKT3. The indicated antibodies were coated into a 96-well round bottom plate at concentration of 100 nM or 15 μg/mL at 200 μl/well in PBS at 4° C. overnight or at 37° C. for a minimum of 2 hours. The plate was washed the next day with 200 μL of PBS and 0.2×10\hat{ }6 PBMCs/well from donors: 10749, 5078 and 15562 (frozen and thawed samples). Supernatant samples were collected on days 3 and 6. A 10-plex Meso Scale Discovery (MSD) assay was run on the supernatants to determine the concentration of cytokines (including IFNγ, IL-10, IL-17A, IL-1α, IL-1β, IL-6, IL-4, TNFα, and IL-2). The data confirmed that PBMCs cells activated/expanded using any of the anti-TCRβV antibodies—BJ1538, BJ1539, BJ1558, BJ1559, BHM1709—secreted lower levels of IFNγ (FIG. 94A), IL-10 (FIG. 94B), IL-17A (FIG. 94C), IL-1α (FIG. 94D), IL-1β 3 (FIG. 94E), IL-6 (FIG. 94F), IL-4 (FIG. 94G) TNFα (FIG. 94H); and higher levels of IL-2 (FIG. 94I).

[1247] In summary, the data shows that anti-TCRvb antibodies recognizing different TCRvb subfamilies (or subtypes) have a similar cytokine profile and do not induce cytokines associated with CRS.

### Example 29: Anti-TCRvb does not Activate T Cells without Cross-Linking

[1248] To assess whether bivalent anti-TCRvb antibodies activate T cells without cross-linking—purified T cells from 2 donors were stimulated with anti-TCRvb (TCRvb 6-5 v1) or anti-CD3e (SP34), either plate-coated or in solution. Supernatants were collected at day 1, 3, 5 and 7 post activation. Cytokine secretion was detected using MSD 10 plex kit (IFN-g, IL-10, IL-15, IL-17A, IL-1a, IL-1b, IL-2, IL-4, IL-6 and TNF-α).

[1249] The results show the PBMCs activated/expanded with anti-TCRvb 6-5 v1 antibody in solution do no induce very little IFNγ secretion as compared to PBMCs activated/expanded with anti-TCRvb 6-5 v1 antibody in immobilized (allowing for crosslinking) (FIG. 95A and FIG. 95B). The results show the PBMCs activated/expanded with anti-TCRvb 6-5 v1 antibody in solution do no induce very little or no IL-1b (FIG. 95C), IL-10 (FIG. 95E), IL-15 (FIG. 95F), IL-17A (FIG. 95G), IL-1a (FIG. 95H), IL-1b (FIG. 95I), IL-2 (FIG. 95J), IL-4 (FIG. 95K), IL-6 (FIG. 95D), and TNF-α (FIG. 95L) secretion. In summary, the data shows that anti-CD3s activates T cells in solution (without crosslinking); while the anti-TCRvb antibodies does not activate T-cells in solution.

### Example 30: Competition of Binding to TCRVB by Two Anti-TCRVβ 5-5,5-6 Antibodies with Distinct Sequences

[1250] This Example describes epitope competition of two anti-TCRVβ 5-5,5-6 antibodies for binding to their shared TCRVB antigen. The TM23 and MH3-2 antibodies both bind to TCRVβ 5-5,5-6. However, the TM23 and MH3-2 antibodies do not share substantial sequence homology.

[1251] As shown in FIG. 25A-25B, anti-TCRβV antibody molecules as described herein recognize a structurally conserved domain on the TCRBV protein (as denoted by the circled area in FIG. 25A), but have low sequence similarity among themselves. To test whether two anti-TCRVβ 5-5,5-6 antibodies which do not share substantial sequence homology, can compete for binding to the TCRBV antigen, a competition assay was carried out.

[1252] Purified MH3-2 antibody was conjugated to AF647. T cells from two donors were preincubated with 500 nM of the TM23 antibody or left untreated. The T cells were then stained with the MH3-2 antibody conjugated to AF647.

[1253] The results show that preincubation of T cells with the TM23 antibody blocks binding of MH3-2 (FIG. 96 and FIG. 97). The data shows that the TM23 antibody competes for binding with the same epitope as the MH3-2 antibody, despite both antibodies having diverse sequences. This data confirms the observation that anti-TCRβV antibody molecules which have low sequence similarities among themselves, bind and recognize a structurally conserved epitope on the TCRBV protein.

### Example 31: Polyfunctional Strength Index of Anti-TCRVβ 6-5 Antibody Expanded T Cells

[1254] The polyfunctional strength index (PSI) of PBMCs were compared to anti-CD3ε antibody expanded CD4+ T cell (FIG. 98A) and CD8+ T cells (FIG. 98B) and anti-TCRVβ 6-5 antibody expanded (Drug Expanded T cells) CD4+ T cells (FIG. 98A) and CD8+ T cells (FIG. 98B). PSI is defined as the percentage of polyfunctional cells in the sample, multiplied by the intensities of the secreted cytokines. The data shows that there is a greater upregulation of PSI in the CD4+ T cells (FIG. 98A) and CD8+ T cells (FIG. 98B) across the groups expanded with anti-TCRVβ 6-5 antibody.

### Example 32: Binding of the Multifunctional Polypeptide Molecule as Described Herein to Soluble TCR and Jurkat Cells Expressing TCR

[1255] In this Example, the binding affinity of a multifunctional polypeptide molecule as described herein for the TCR is tested.

[1256] Jurkat cells expressing TCR are stained with increasing concentrations of a multifunctional polypeptide molecule as described herein or a control TCRvb antibody at 4 Celsius for 30 min. Subsequently, the cells are washed with PBS buffer and antibodies bound to the surface of the cells are detected by PE-labeled anti-human Fe antibody. The percentage of the positive stained cells are blotted against the concentration. The binding of the multifunctional polypeptide molecule as described herein to soluble TCR is plotted as a graph. The Kd of the multifunctional polypeptide molecule as described herein to bind soluble TCR is calculated.

[1257] The multifunctional polypeptide molecule as described herein is immobilized on a CM5 Series S Sensor Chip via Anti-human Fe antibody to 50 RU. Soluble TRBV antigen is diluted to, e.g., 500 nM and then serially diluted two-fold. The time duration for association and dissociation is measured. This assay is run in 1×HBS-EP+ Buffer pH 7.4 and at 25 C. It is evaluated whether the data is fit using a 1:1 binding model. The binding of the multifunctional polypeptide molecule as described herein or the control anti-TCRvb antibody to TCR expressed on Jurkat cells is plotted as a graph. The EC50 for the multifunctional polypeptide molecule as described herein is calculated and compared with the EC50 for the anti-TCRvb antibody.

### Example 33: In Vitro and In Vivo Characterization of a Multifunctional Polypeptide Molecule as Described Herein

[1258] This Examples describes the characterization of a murine anti-TCRvb antibody and the multifunctional polypeptide molecule as described herein. Similar to the human clonotypes (subfamilies), the TCRb variable chain locus in mice consists of 31 different families with a total of 35 subfamilies of which 23 are functionally expressed. A surrogate TCRvb clonotypical antibody for mice strain C57BL/6 has been identified which shares similar characteristics with the human TCRvb antibodies. This anti-mouse TCRvb antibody binds specifically to TCRvb in C57BL/6 mice which are expressed on approximately 15% of all T cells. Similar to the human TCRvb specific antibodies, this murine TCRvb specific antibody induces murine T cell proliferation and a similar cytokine profile in vitro. The discovery of anti-TCRvb antibody enables the evaluation of TCRvb-mediated T cell activation and re-directed cell killing in fully immuno-competent mice models, as well as to assess memory anti-tumor response in vivo.

[1259] First, the in vitro functional activity of the multifunctional polypeptide molecule as described herein is tested. Splenic mononuclear cells are freshly isolated from C57BL6 mice, treated with the multifunctional polypeptide molecule as described herein. The isolated cells are assessed for TCRvβ+ T cell binding, expansion and activation. Cells are treated with, e.g., 0.0008-200 nM doses (4-fold dilutions) of the multifunctional polypeptide molecule as described herein in RPMI-1640 with 10% FBS, or medium alone, for, e.g., 6 days. On, e.g., day 3 and 6, cells are analyzed by flow cytometry using the exemplary antibodies shown below:

TABLE 18

| Primary Ab | Secondary Ab |
|---|---|
| eFluor780 | Viability |
| CD20 | A647 |
| CD3 | BV421 |
| TCRVβ 13-2/3 | PE |
| CD25 | FITC |

[1260] The multifunctional polypeptide molecule as described herein bound specifically to splenic T cells from C57BL6 mice is plotted as a graph. Activation and expansion of mTCRvβ+ T cells is analyzed at, e.g., day 3 and 6, respectively. The in vitro characterization of the multifunctional polypeptide molecule as described herein is expected to show that the multifunctional polypeptide molecule as described herein serves as a surrogate tool for syngeneic tumor model studies.

[1261] Next, in vivo experiments are performed with the multifunctional polypeptide molecule as described herein. On day 0, 8 week old female C57BL/6 mice are randomized in to three arms (e.g., n=5/arm) based on body weight. Mice are intravenously injected once either with PBS, e.g., 0.1 mg/kg and 1 mg/kg of the multifunctional polypeptide molecule as described herein. On Day 3 mice are sacrificed and harvested for whole blood and spleen. Tissues are subjected to Flow cytometry and checked for B-cells, NK cells, TCRvb+θcells and CD3+θcells.

[1262] The multifunctional polypeptide molecule as described herein is expected to expand mouse NK cells in vivo, in the blood and spleen. The study is also expected to demonstrate whether the multifunctional polypeptide molecule as described herein is tolerated at the indicated doses and duration of study.

### Example 34: Target Cell Lysis and Cytokine Profile of the Multifunctional Polypeptide Molecule as Described Herein

[1263] This Example describes potent lysis of target cells and reduced CRS associated cytokine secretion with the multifunctional polypeptide molecule as described herein.

[1264] To test target cell killing, αTCRvβ pre-expanded T cells are incubated with target cells, e.g., Raji target cells in the presence of the multifunctional polypeptide molecule as described herein or αTCRvβ antibody for 24 hours. Target cell lysis is assessed by a KILR Cytotoxicity and Cytokine Quantification as follows. Human PBMCs are isolated from whole blood. From isolated PBMC's, human CD3+ T cells are isolated using magnetic-bead separation (negative selection) (Miltenyi biotec) and activated by immobilized (plate-coated) anti-TCR Vβ13.1 (e.g., A-H.1 or BHM1709) at, e.g., 100 nM for, e.g., 6 days. Activated T-cells (from plate-coated) are then transferred and expanded in tissue culture flask at a concentration of, e.g., 50 U/ml for an additional 2 days. Expanded TCR Vβ13.1 are washed and co-cultured in the presence of target cells (e.g., Raji Cells) at a E:T ratio of 5:1 and serial diluted concentration of the multifunctional polypeptide molecule as described herein and anti-TCR Vβ (serving as control) for, e.g., 24 hours. Post, e.g., 24 hours, cell co-culture supernatants are collected and quantified for specific target cell death. Target cells (Raji cells) are a KILR-retroparticles reporter cell assay (DiscoverX).

[1265] KILR-Raji Target cells are engineered to stably express a protein tagged with enhanced ProLabel (ePL), a β-gal reporter fragment, using the KILR Retroparticles, and when its membrane is compromised due to cell death, it will release the tagged protein into the media. The KILR reporter protein is detected in the media/supernatant by the addition of detection reagents containing the enzyme acceptor (EA) fragment of the β-gal reporter. This leads to the formation of the active β-gal enzyme which hydrolyzes the substrate to give a chemiluminescent output (RLU). Percentage (%) of target cell death is calculated using the following formula: (RLU_{Treatment}−RLU_{No Treatment})/(RLU_{Maximum Lysis}−RLU_{No Treatment})×100. The pre-expanded T cells (TrEKs) by the multifunctional polypeptide molecule as described herein are expected to demonstrate efficient killing of Raji target cell at low effector. The multifunctional polypeptide molecule as described herein may require time for differentiation and expansion of TCRvβ+ T cells.

[1266] To determine if the lack of CRS associated cytokine induction by immobilized anti-TCRvβ antibodies can be recapitulated by the multifunctional polypeptide molecule as described herein, human PBMCs are incubated in the presence of T cell-activating multispecific molecules polypeptide molecule as described herein at, e.g., 3 nM. Supernatant are collected on day 1 to day 6, and cytokines are quantified by using MSD. The multifunctional polypeptide molecule as described herein may show increased cytokine production against a backdrop of delayed and reduced levels of CRS-related cytokines.

### Example 35: Cytokine Profile of the Multifunctional Polypeptide Molecule as Described Herein

[1267] This Example describes cytokines secreted by PBMCs following activation by the multifunctional polypeptide molecule as described herein. For comparison, activation by an anti-TCR beta constant 1 (TRBC1) antibody is also analyzed.

[1268] Briefly, human PBMCs are isolated from whole blood followed by solid-phase (plate-coated) stimulation with Molecule H or Antibody F at 100 nM. Supernatant is collected on, e.g., Days 1, 2, 3, and 5 (for Molecule H) or Days 2 and 5 (for Antibody F) followed by multiplex cytokine analysis for, e.g., IFNγ, IL-2, IL-1β, IL-6, IL-10, and TNFα, quantified using MSD (Meso Scale Discovery) platform, following the manufacturer's protocol. The cytokine profile of the multifunctional polypeptide molecule as described herein is expected to be different from that of the anti-CD3 antibody OKT3 or the anti-TRBC1 Antibody F.

### Example 36: Pharmacokinetic (PK) Profile of the Multifunctional Polypeptide Molecule as Described Herein in Mice

[1269] This Example describes the pharmacokinetic (PK) profile of the multifunctional polypeptide molecule as described herein in mice to guide the dosing and/or schedule treatment decision for the efficacy study. The exemplary study design is shown in FIG. 99. Briefly, on day 0, 6-8 week old female NSG mice are implanted subcutaneously with, e.g., 1×10⁶ Raji leukemia cells. On day 2, mice are humanized by injecting 10×10⁶ human PBMCs via the peritoneal cavity. On day 9, mice are treated with a single dose of the multifunctional polypeptide molecule as described herein intravenously. Serum is harvested from animals by submandibular bleed at 0, 0.5, 1, 6, 24, 48, 72, 96, 148 hours (n=3 per time point). Serum drug concentration is measured by Sandwich ELISA.

[1270] The serum half-life of the multifunctional polypeptide molecule as described herein in tumor bearing humanized NSG animals is calculated. This data are expected to allow dose and schedule determination for efficacy studies. Exposures at the dose allows coverage above cellular EC90.

### Example 37: Optimization of the Multifunctional Polypeptide Molecule as Described Herein

[1271] The multifunctional polypeptide molecule as described herein is optimized to improve affinity for the human and cyno antigen, improve thermal stability, and remove sequence motifs that might pose chemical stability liabilities. For example, ScFv libraries for TCRβV-binding moieties are built using random mutagenesis (Caldwell et al. (1992) Randomization of genes by PCR mutagenesis. PCR Meth. Appl. 2:28) or a modified version of Kunkel mutagenesis (Kunkel T A. (1985) Rapid and efficient site-specific mutagenesis without phenotypic selection. PNAS 82(2): 488-92). For affinity improvement, library selections vs human and cyno antigens are performed using standard phage display (Lee, C M et al. (2007) Selection of human antibody fragments by phage display. Nature protocols 2, 3001) and yeast display techniques (Chao G, et al. (2006) Isolating and engineering human antibodies using yeast surface display. Nature Protocols. 1(2):755-69). Thermal challenge of phage or yeast populations is used to select for clones with improved thermal stability. Selections are followed by standard screening methods such as ELISA and flow cytometry to identify individual clones with improved properties. Following hit sequencing and analysis of mutation-activity correlation, second-generation libraries are constructed using the same methods above. Library selections and individual clone screening are repeated as above with the modification that more stringent conditions are applied to select for clones with maximized activity. Following hit sequencing, scFv genes for TCRβV-binding moieties are reformatted into the biologically relevant antibody format for expression, purification, and triaging.

### Example 38: Therapeutic Efficacy of the Multifunctional Polypeptide Molecule as Described Herein in Subcutaneous Human Tumor Xenograft Models

[1272] This Example demonstrates the in vivo efficacy of the multifunctional polypeptide molecule as described herein in a subcutaneous human tumor animal model.

[1273] On day 1 of the study, e.g., 1×10⁶ cells of the human cancer cell line Raji, stably expressing firefly luciferase (Raji-luc) are subcutaneously injected in the right dorsal flank of female NOD/SCID/IL-2Rγnull (NSG) mice. On day 3, e.g., 10×10⁶ human PBMCs are transplanted into mice by injection into the peritoneal cavity.

[1274] Treatment with the multifunctional polypeptide molecule as described herein starts at day 10, when tumors has reached a mean tumor volume (TV) of e.g., 80 mm³. Mean TV of each group is not statistically different from any other group at start of treatment. Mice are treated with e.g., 0.2 mg/kg, 1 mg/kg and 5 mg/kg of the multifunctional polypeptide molecule as described herein every three days for a total of, e.g., 7 doses by intravenous bolus injection. Tumor volume (TV) is measured every 3 days by calipers and progress evaluated by intergroup comparison of TV. Tumor growth inhibition T/C [%] is calculated as T/C[%]=100×(mean TV of analyzed group)/(mean TV of vehicle group). Treatment with the multifunctional polypeptide molecule as described herein is expected to inhibit tumor growth compared to vehicle control treatment. The results are expected to demonstrate that the multifunctional polypeptide molecule as described herein inhibits tumor growth and has anti-tumor activity.

### Example 39: Therapeutic Efficacy of Multifunctional Polypeptide Molecule as Described Herein in Human Tumor Xenograft Models

[1275] This Example demonstrates the in vivo efficacy of the multifunctional polypeptide molecule as described herein in a xenograft animal model.

[1276] On day 1 of the study, e.g., 10×10⁶ human PBMCs are transplanted into NOD/SCID/IL-2Rγnull (NSG) mice by injection into the peritoneal cavity. On day 7, e.g., 1×10⁶ cells of the human cancer cell line Raji, stably expressing firefly luciferase (Raji-luc) are intravenously injected into NOD/SCID/IL-2Rγnull (NSG) mice. Control animals are injected with e.g., 10×10⁶ cells of the human control cancer cell line K562 stably expressing firefly luciferase (K562-luc). These animals are used to assess specific killing ability of the multifunctional polypeptide molecule as described herein. Treatment with the multifunctional polypeptide molecule as described herein starts at day 16, when tumor engraftment has reached a mean bioluminescence flux level of e.g., 4×10⁷ photons/s. Mean Flux level of each group is not statistically different from any other group at start of treatment. Mice are treated with e.g., 1 mg/kg and 5 mg/kg of the multifunctional polypeptide molecule as described herein every three days for a total of, e.g., 6 doses by intravenous bolus injection. Tumor burden is measured weekly by bioluminescence imaging and progress evaluated by intergroup comparison of total bioluminescence flux (Total Flux). Tumor growth inhibition T/C [%] is calculated as T/C[%]=100×(mean Total Flux of analyzed group)/(mean Total Flux of vehicle group).

[1277] The results are expected to demonstrate that the multifunctional polypeptide molecule as described herein inhibits tumor growth and has anti-tumor activity.

### Example 40: Therapeutic Efficacy of the Multifunctional Polypeptide Molecule as Described Herein in Human Tumor Xenograft Models

[1278] This Example demonstrates the in vivo efficacy of the multifunctional polypeptide molecule as described herein in a xenograft animal model.

[1279] On day 1, e.g., 20×10⁶ cells of the human cancer cell line RPMI-8226, stably expressing firefly luciferase (RPMI-8226-luc) are intravenously injected into NOD/SCID/IL-2Rγnull (NSG) mice. On day 11, e.g., 10×10⁶ human PBMCs are transplanted into mice by injection into the peritoneal cavity. Treatment with the multifunctional polypeptide molecule as described herein starts at, e.g., day 17, when tumor engraftment has reached a mean bioluminescence flux level of, e.g., 4×10⁷ photons/s. Mice are treated with e.g., 0.5 mg/kg of the multifunctional polypeptide molecule as described herein once a week for a total of, e.g., 2 doses by intravenous bolus injection.

[1280] Tumor burden is measured weekly by bioluminescence imaging and progress evaluated by intergroup comparison of total bioluminescence flux (Total Flux). Tumor growth inhibition T/C [%] is calculated as T/C[%]=100×(mean Total Flux of analyzed group)/(mean Total Flux of vehicle group).

[1281] Treatment with the multifunctional polypeptide molecule as described herein is expected to inhibit tumor growth compared to vehicle control treatment. The results are expected to demonstrate that the multifunctional polypeptide molecule as described herein inhibits tumor growth and has anti-tumor activity.

### Example 41: Production of Bispecifics

[1282] All DNA sequences encoding the bispecific molecules were synthesized by GeneArt and cloned into the mammalian expression vector pcDNA3.4. The ExpiCHO expression system was used for expression of BKM0186. ExpiCHO-S Cells were grown to the optimal transfection density and viability in ExpiCHO expression medium according to the manufacturer's protocol. Cells were transiently transfected using the ExpiFectamine™ CHO Transfection Kit according to the manufacturer's protocol. Each chain was added in a 1:1:1 wt/wt/wt ratio. The max titer protocol was used where on the day after transfection, ExpiFectamine™ CHO Enhancer and ExpiCHO™ Feed are added to the flask followed by transfer of the flask to a 32° C. incubator with a humidified atmosphere of 5% CO2 in air. On Day 5 after transfection, the second volume of feed is added and the flask is returned to the 32° C./5% CO2 incubator and harvested on Day 14 after transfection. Cells are harvested by centrifugation and subsequent filtration using a 0.22 μm filter.

[1283] Following harvest and filtration, the clarified cell culture supernatant was loaded onto a 40 mL column packed with MabSelect SuRe resin equilibrated with Dulbecco's PBS pH 7.4 at a flow velocity of 226 cm/hr using an AKTA Pure FPLC. The column was washed with 20 column volumes (CV) of DPBS or until the UV280 reaches baseline. BKM0186 was then eluted with 5 column volumes of 20 mM Citrate, 150 mM NaCl pH 3.0. The eluate was neutralized with 10% Tris-HCl pH 8.0. The concentration of the neutralized eluate was quantified using a Nanodrop One-C using the extinction coefficient. Following analysis, the Protein A eluate was diluted 10-fold in cation exchange (CEX) Buffer A: 50 mM MES, 20 mM NaCl pH 5.6 and applied to a Mono S™ 10/100 GL column equilibrated with Buffer A at 458 cm/h using an AKTA Pure FPLC. Following a 10 CV wash step with Buffer A, bispecifics were eluted with a 20 CV 0-50% gradient of Buffer B: 50 mM MES, 1 M NaCl, pH 5.6. The main peak containing the protein of interest (POI) was pooled. The CEX pool was buffer exchanged using a HiPrep 26/10 desalting column equilibrated with formulation buffer: 20 mM Histidine, 7% Sucrose, 0.02% Tween 80, pH 6.0, at a flow velocity of 113 cm/hr on an AKTA Pure FPLC. The formulated material was quantified and analyzed via analytical SEC (aSEC) and SDS-PAGE to determine purity.

[1284] Analytical SEC was performed using an AdvanceBio SEC 300A 2.7 um 4.6×300 mm SEC column equilibrated with 50 mM Sodium Phosphate, 300 mM NaCl pH7.0 at 0.35 mL/min on an Agilent 1100 HPLC. The SDS-PAGE gel was stained with Coomassie Blue stain.

### Example 42: Plasmon Resonance (SPR) Binding

[1285] All interactions between bispecifics and relevant receptors were analyzed by Surface Plasmon Resonance (SPR) on a Biacore T200 instrument.

[1286] BKM0186 at 2 μg/mL was immobilized on a Series S CM5 chip via human Fe antibody to 80 RU. Human IL2Ra and cynomolgus IL2Ra were diluted to 500 nM, human IL2R beta-gamma and cynomolgus IL2R beta-gamma were diluted to 125 nM, and human IL2R trimeric complex was diluted to 50 nM and then serially diluted two-fold in 1×HBS-EP+ buffer for a total of 10 concentrations. Multi cycle kinetics was run where the chip is regenerated with 3 M Magnesium Chloride between each cycle followed by a new injection of BKM0186. An association time of 120 seconds and a dissociation time of 150 seconds for human and cyno IL2Ra, 300 seconds for human and cyno IL2R beta-gamma, and 900 seconds for the human IL2R trimeric complex was done at 30 uL/min. This assay was run in 1×HBS-EP+ Buffer pH 7.4 and 25 C. Sensorgrams were corrected by double reference subtraction using the reference flow cell not treated with BKM0186 and a blank cycle of buffer alone. BIAevaluation software was used for data analysis and the data were fit using a 1:1 Langmuir binding model for calculation of the KD value (Koff/Kon). Due to faster off rates observed for human and cyno IL2Ra binding, the data were fit using a steady state model where equilibrium binding response is analyzed.

[1287] BKM0186 at 2 μg/mL was immobilized on a Series S CM5 chip via human Fe antibody to 80 RU. Human Vβ6 TCR and cynomolgus Vβ6 TCR were diluted to 250 nM and then serially diluted two-fold in 1×HBS-EP+ buffer for a total of 10 concentrations. Multi cycle kinetics was done with an association time of 120 seconds and a dissociation time of 600 seconds, for human Vβ6 TCR and 300 seconds for cynomolgus Vβ6 TCR at 30 uL/min. This assay was run in 1×HBS-EP+ Buffer pH 7.4 at 25 C. Sensorgrams were corrected by reference subtraction using the reference flow cell not treated with BKM0186. BIAevaluation software was used for data analysis and the data were fit using a 1:1 Langmuir binding model for calculation of the K_{D} value (K_{off}/Kₒₙ).

[1288] BKM0186 has high affinity binding (Table 19) to both human and cynomolgus Vβ6 TCRs as assessed by surface plasmon resonance (SPR). Additionally, BKM0186 exhibits comparable binding to both human and cynomolgus IL-2Rα and IL-2Rβγ heterodimers and the binding affinities are broadly in line with previously reported values.

[1289] Binding of BKM0186 to T cells as assessed using FACS analysis of PBMCs further demonstrates exquisite selectivity of BKM0186 to Vβ6 T cells with no measurable binding observed to any other immune cells (FIG. 104).

TABLE 19
Binding affinity of BKM0186 to the cognate binding receptors
measured using Surface Plasmon Resonance (SPR)

| Antigen | BKM0186 (K_{D}) | |
|---|---|---|
| Human TCRVβ | 1.7 | nM |
| Cyno TCRVβ | 4.9 | nM |
| Human IL-2Rα | 45 | nM |
| Cyno IL-2Rα | 48 | nM |
| Human IL-2Rβγ | 3.8 | nM |
| Cyno IL-2Rβγ | 3.3 | nM |
| Human IL-2Rαβγ | 0.1 | nM |

### Example 43: Selective Binding of BKM0186 to T Cells within PBMC Mixture

[1290] Normal health donor human PBMCs were resuspended in at 2 million cells/mL in PBS and 100 μL added to each well of a round bottom tissue culture treated sterile plate. Post staining with Fixed Viability Dye, appropriate quantities of commercially available fluorochrome labeled surface antibodies (Panel 1) were added to the appropriate sample wells. The plates were vortexed and incubated at 2-8° C. (refrigerated) in the dark for 30 minutes. Following staining for Panel 1, plates were centrifuged (set at 400×g; 5 minutes; RT), supernatant aspirated and washed twice with 200 μLs of 1% BSA PBS. Cell pellets for Panel 1 were then resuspended in 0.2 mL of 1% PFA, before transfer to a 96 well u-bottom plate for analysis.

TABLE 20
Exemplary antibodies used

| # | Antibody | Conjugate | Clone | Vendor |
|---|---|---|---|---|
| 1 | CD4 | BV7185 | L200 | BD |
| 2 | CD8 | BV650 | RPA-T8 | BD |
| 3 | CD2 | Per Cp Cy5.5 | RPA-2.10 | BioLegend |
| 4 | CD3 | BV605 | 10D12 | Miltenyi |
| 5 | NKG2A | PE | Z199 | Beckman Coulter |
| 6 | TCRvβ | AF647 (Read as APC) | — | Marengo |
| 7 | CD20 | PE Cy7 | J3.119 | Beckman Coulter |
| 8 | CD14 | FITC | M5E2 | BioLegend |
| 9 | Live/Dead | NUV450 | N/A | ThermoFisher |

[1291] Binding of BKM0186 to T cells as assessed using FACS analysis of PBMCs further demonstrates exquisite selectivity of BKM0186 to Vβ6 T cells with no measurable binding observed to any other immune cells (FIG. 104).

### Example 44: Binding of BKM0186 to Pure T Cells Expressing Either V06 TCR and/or CD25

[1292] Pan T-cells were isolated from PBMC's via negative selection on the autoMACS. T-cells were stained for TCRVβ6-5 and sorted on the Sony SH800 cell sorter into cell culture media. Sorted TCRVβ6-5 T-cells and non-sorted pan T-cells were activated and expanded using anti-CD3/CD28 beads followed by IL-2 culture. Portion of activated T-cells were allowed to rest for 3-days in serum-free media. Anti-CD25 FACS staining to confirm CD25 upregulation (from activation) and downmodulation (from resting). T-cells that represents TCRVβ6-5(pos) CD25(hi); TCRVβ6-5(pos) CD25(low); TCRVβ6-5(neg) CD25(hi); TCRVβ6-5(neg) CD25(low) are checked for BKM0186 construct binding.

[1293] As shown in FIG. 105, BKM0186 was shown to bind Vβ6 CD25^{Hi} T cells (circle) with greater avidity, as a result of co-operative binding, with a binding EC₅₀ of 0.5 nM compared to either non-V36 CD25^{Hi} T cells (square) and Vβ6 CD25^{Low} T cells (triangle). This avidity effect confirms that BKM0186 engages both Vβ6 and IL-2R via a cis binding mode.

### Example 45: In-Vitro T-Cell Stimulation and Expansion in Primary Human Peripheral Blood Mononuclear Cells (PBMCs)

[1294] Peripheral blood mononuclear cells were isolated from blood leukapheresis samples using density gradient separation. Human T-cells were stimulated and expanded from peripheral blood mononuclear cells with the addition of BKM0186 (concentration specified in text) cultured in X-Vivo 15 media for 5 days, incubated at 37° C.

[1295] Binding of BKM0186 to Vβ6 T cells results in selective expansion of only Vβ6 T cells when assessed over a period of 5 days in healthy human PBMCs at 37° C. FIG. 106 shows a concentration-effect curve of BKM0186-mediated activation (CD25 expression) and expansion (positivity for Vβ6 TCRs) in both human CD4 and CD8+ T cells. These plots show the extent of proliferation of Vβ6 T cells as a proportion of the total CD8+ and CD4+ T cell populations with an EC₅₀ of 6 and 12 nM, respectively. Pronounced upregulation of CD25 in the expanded CD4+ and CD8+Vβ6 T cells indicates the activated state of these cells. Additional in vitro activation assays in human PBMCs demonstrate upregulation of other activation markers (e.g., Granzyme B, CD69, ICOS, etc) particularly on CD8+ T cells, further characterizing their cytotoxic potential.

[1296] Expanded CD4 and CD8+Vβ6 T cells were further assessed for various markers of memory sub-pools that demonstrated a consistent shift of BKM0186-treated human PBMCs to either central memory (TCM) phenotypes.

[1297] Using identical protocols, expansion of TCRVβ+ T cells mediated by additional bispecific constructs BMM0317, BLM0318 and BLM0321 was demonstrated as shown in FIG. 124.

### Example 46: In-Vitro TCR Sequencing

[1298] Total RNA was extracted from T cells using Maxwell SimplyRNA Kit. The RNA was quantified using Qubit High Sensitivity RNA Assay and quality was analyzed using Agilent Tape station. Sequencing libraries were generated using SMARTer Human TCR a/b Profiling Kit for human cells, or SMARTer Mouse TCR a/b Profiling Kit according to the manufacturer's protocol. Final libraries were then pooled and sequenced (paired end, 300 bp) on Illumina MiSeq. Data generated was demultiplexed and FastQC was performed after trimming. MiXCR pipeline tool was used to specifically align sequence reads to TCR germline segments of TRA, TRB, TRD and TRG genes in the datasets for clonotype identification, CDR3 sequences and clonotype abundances. TRBV genes are counted and grouped together among their specific clonotypes and plotted as a bar chart representing frequency/abundance. Each TRBV gene is plotted against relative abundance (where 1 equals 100% of total TRBV gene), equivalent to total T-cell abundance. BKM0186 selectively expanded T cells bearing TRBV6-1, TRBV6-2, TRBV6-3, TRBV6-5 and TRBV10-3. (FIG. 107)

### Example 47: Expansion and Activation of TCRVβ6+ T Cells by BKM0186

[1299] Cryo-preserved PBMCs were thawed and rested for 30 min at 37° C., then plated at 3×10⁵ cells per well in a 96-well round-bottom plate. Sterile biotinylated constructs were diluted in X-Vivo 15 media and serial dilutions were performed. Wells without construct (media alone) were used to determine background signal. Cells were incubated with construct for 5 days at 37° C. Early on day 5, Brefeldin was added to all wells and cells were incubated for another 4 hours. Cells were then transferred to a V-bottom plate for staining. Cells were spun and washed, then stained with viability dye, followed by surface markers, biotinylated TCRvB monoclonal antibody, and secondary streptavidin antibody to detect both TCRvB-bound cells and construct. After thorough washing, cells were fixed and permeabilized using the eBioscience FoxP3 staining kit. FoxP3, granzyme B, and IFNg were stained in permeabilization buffer. Following washes with permeabilization buffer, cells were resuspended in flow buffer (PBS+BSA) and run on the Cytek Aurora. Analysis was performed in FlowJo. FIG. 108A shows robust expansion of both CD4+ TCRVβ6+ and CD8+ TCRVβ6+ T cells mediated by BKM0186 while very little to no expansion was observed with the controls RSV-IL2 bispecific and anti-TCRVβ6 arm mAb indicating that the expansion is mediated by crosslinking of both TCR and IL2R. The activation of TCRVβ6+ T cells by BKM0186 resulted in upregulation of granzyme B and Interferon gamma cytokine as shown in FIG. 108B.

### Example 48: Evaluation of Memory T Cell Differentiation

[1300] Peripheral blood mononuclear cells, PBMC's were isolated from blood leukapheresis samples using density gradient separation. Human T-cells were stimulated and expanded from peripheral blood mononuclear cells with the addition of BKM0186 or control RSV-IL2 at 10 ng/ml in solution and cultured in X-Vivo 15 media for 7 days, incubated at 37° C. Monovalent anti-TCRVβ6 antibody was immobilized on to plate for stimulation to serve as a TCRVβ-only control. After stimulation, PBMCs were stained for CD3, CD4, CD8, CD45RA, CCR7, and TCRVβ6 for flow cytometry analysis using (FITC) anti-human CD45RA (clone 5H9), (PE) anti-human CCR7 (clone OX-108), (BV-421) anti-human CD4 (clone OKT4), (PerCP-Cy5.5) anti-human CD8 (clone SKI), Biotinylated TCRVβ6 monoclonal antibody, AlexaFluor 647 Streptavidin antibody. TCRVβ6 positively stained CD4 or CD8 T cells were gated to characterize memory phenotype expression mediated by BKM0186 and control treatment. As shown in FIG. 109, BKM0186 showed robust expansion in both Central memory (upper left) and Effector memory (lower left) quadrants.

### Example 49: Cytokine Induction Mediated by Stimulation of PBMCs by BKM0186

[1301] Supernatants from in vitro human PBMC stimulation assays were further assayed for inflammatory cytokine levels using Meso Scale Detection (MSD) immunoassays. Stimulation of human PBMCs with BKM0186 led to moderate release of some proinflammatory cytokines as shown in FIG. 110. Consistent with published findings, these cytokine levels were generally lower than levels assayed from human PBMCs stimulated with an anti-CD3 bispecific antibodies. Of note, the cytokine release profiles following activation of cynomolgus monkey PBMCs with BKM0186 was similar to the profile in stimulated human PBMCs using this assay.

### Example 50: Binding Ex Vivo Cytotoxicity Evaluation of BKM0186 in Autologous TIL-PDX-O Co-Culture Using High Content Analysis (HCA)

[1302] BKM0186 within four concentrations ranging from 0.3-10 μg/mL as a single agent, was evaluated ex vivo in autologous TIL-PDX-O co-culture from 4 patient-derived Champions TumorGraft® models: CTG-3493, CTG-3571 representing human non-small cell lung cancer, CTG-3629 representing human rectal cancer, and CTG-3631 representing human colorectal cancer by confocal high content analysis (HCA). Tumor cell cytotoxicity was also assayed by the relative organoid fluorescent intensity and relative organoid area

[1303] The high content analysis assay using confocal microscopy was developed with three colors. TILs and PDX-O tumor cells are labeled with distinct dyes prior to co-culture, and a dead cell detection dye is added to the co-culture at the study endpoint. On Day −3, cryopreserved PDX fragments were thawed, counted, and stained with CellTracker Deep Red (CTDR). Stained PDX-fragments were washed and re-suspended in PDX-organoid media and plated at a density of approximately 5000 cells in 50 μl organoid media/well in a 96-well plate ultra-low attachment round bottom plate. Organoids were allowed to form over a period of 3-days. After three days, on Day 0, PDX-O matched TILs were stained with Cell Trace Violet (CTV). Stained TILs were washed, re-suspended in TIL media, and co-cultured with matched PDX-O at a density of approximately 25,000 cells/well (in 50 μL TIL media) in the appropriate wells. On the same day (Day 0), control(s) and BKM0186 at different concentrations (in additional 50 μL PDX-O media) were administered in quadruplicates. At the study endpoint, on Day 5 (approx. 120 hours after TIL and test agent/control administration), the NucGreen® Dead 488 probe was added directly to the wells to stain dead cells. Image z-stacks were captured approximately 3 hours after dead cell stain at 4× magnification using CellInsight CX7 LZR HCA instrument. Images were collected using filter sets appropriate for each marker and analyzed using HCS Cellomics Studio Software (per well). For all the models examined, PDX-O cytotoxicity was quantified through examination of organoid fluorescent intensity and is reported as relative organoid fluorescent intensity and relative organoid area (normalized to Isotype molecule).

[1304] In 3 out of 4 donors, BKM0186 potently expanded and activated in situ human TILs that then elicited potent killing of surrounding tumor tissue as represented by reduction in the organoid size (FIG. 111). Both TIL expansion and human tumor-killing was significantly more potent with samples treated with BKM0186 compared with the same samples treated with a clinically available anti PD-1 antibody (Pembrolizumab; Keytruda).

### Example 51: In Vivo Mouse Model Experiments (Syngeneic Mouse Tumor Studies)

[1305] As a result of the limited homology between human and mouse or other rodent species at the TRB locus, a direct homolog of the Vβ6 gene (TRBV6) does not exist and so the likelihood of species cross-reactivity of BKM0186 and BKM0281 beyond non-human primates is very low. Therefore, efficacy experiments performed in syngeneic murine tumor models were conducted with a mouse orthologue molecules (mBKM0186 and mBKM0281) with similar molecular configurations as human molecules, that targets and expands Vβ13 TCR expressing murine T cells and recapitulates the immunology of BKM0186 and BKM0281 in mice. Vβ13 T cells are one of the most abundant germline V3 TCR variants in mice and are expressed in TILs of all tumor bearing mice.

[1306] All mice were acquired from The Jackson Laboratory. All procedures were performed in compliance with established ethical regulations and were approved by the Institutional Animal Care and Use Committee (IACUC).

[1307] Mouse tumor cell lines RENCA (CRL-2947), B16F10 (CRL-6475), CT26 (CRL-2638), RM1 (CRL-3310) and EMT6 (CRL-2755) were obtained from American Type Culture Collection. MC38 were obtained from NIH (ENH204-FP). Cell lines were tested for mycoplasma and other pathogens and cultured according to their guidelines.

[1308] BALB/c female mice were implanted with 1×10⁵ of RENCA cells resuspended in PBS; 5×10⁴ of CT26 or EMT6 cells resuspended in PBS. C57BL/6 female mice were implanted with 5×10⁴ of MC38; 2×10⁴ of B16F10 cells resuspended in PBS. C57BL/6 male mice were implanted with 2×10⁴ of RM1 cells resuspended in PBS by subcutaneous injection on the right flank. Following tumor implantation, mice were randomized into treatment groups (8-10 mice per group) when tumor size reached between 80-150 mm³. Mice were monitored for morbidity and mortality daily.

[1309] Antibodies were administered by intraperitoneal injection (Day 0) with murine surrogate bispecifics (1.0-1.5 mg/kg), or PBS once per week for 3-4 treatments. Tumor growth was monitored over time using caliper measurement of X and Y diameter, and body weight recorded. Tumor volume was calculated [X*Y*(X/2)]. Mice were euthanized when tumor volume reached 2000 mm³, or loss of body weight of more than 20% within a 1-week timeframe as indicated in the IACUC protocol CR-0147. Surviving cured mice will continued to be monitored until they reach Day 100. Additionally, tumor-free cured mice were rechallenged with tumor cell lines on the left flank to evaluate memory response.

[1310] As shown in the Kaplan-Meier survival plots in FIG. 114 and tumor growth curves in FIG. 113, mBKM0186 resulted in significant regression of tumors in all the models including the anti-PD-1 resistant RENCA, B16F10 and RM1 models, resulting in significant improvement in survival, except in the very aggressive RM1 model. In EMT6, this effect was dose related across a dose range of QW IP 0.5, 1, and 1.5 mg/kg doses of mBKM0186 and mBKM0281 with weekly doses of 1 mg/kg and 1.5 mpk of mBKM0186 and 1.5 mpk of mBKM0281 appearing to be optimal (FIG. 112). Furthermore, 100% cured EMT6 mice upon rechallenging with the respective tumor cells exhibited no tumor growth demonstrating induction of memory. This long-term protection from tumor re-challenge in mice also appears to be due to the accumulation of memory CD8+Vβ13 T cells (FIG. 115 and FIG. 116). Overall, these data support the possibility that BKM0186 will promote both potent and durable anti-tumor responses as a single agent in humans.

### Example 52: Pharmacodynamics and Mechanistic Studies in Syngeneic Models

[1311] To further explore mechanisms underlying the observed anti-tumor activity with mBKM0186, immune profiling of TILs isolated from murine EMT6 tumors after treatment with vehicle or mBKM0186 were assessed by flow cytometry and immunohistochemistry (IHC) on tissue sections. Following 14 days of QW dosing (i.e., 2 doses) with mBKM0186, a significant accumulation of Vβ CD8+ T cells in TILs was noted compared with vehicle treated mice. Given the degree of expansion of Vβ CD8+ T cells, this was reflected in an overall significant increase in the numbers of CD8+ T cells in tumors with a significant proportion showing upregulation of cytolytic molecules such as granzyme B. (FIG. 117)

[1312] Importantly, the ratio between CD8+ T cells and FoxP3+ Regulatory T cells (Treg) also significantly increased post treatment with mBKM0186. To confirm that mBKM0186 expanded Vβ CD8+ T cells are responsible for the anti-tumor effects observed in syngeneic mice, EMT6 mice were treated with mBKM0186 in the presence and absence of a specific V3 T cell-depleting antibody. As shown in FIG. 118, the anti-tumor effects of mBKM0186 were abolished in mice that also received doses of the Vβ T cell-depleting antibody, thereby confirming the central importance of the expanded and activated VP T cell population to the efficacy of mBKM0186 in mice.

### Example 53: In Vivo Cynomolgus Monkey Experiments

[1313] Exploratory studies of intravenous (IV) infusions of BKM0186 and BKM0281 at multiple doses were conducted to assess preliminary safety and tolerability, pharmacokinetics, and pharmacodynamics. All studies were conducted in naïve female cynomolgus monkeys (Macaca fascicularis, of Cambodian origin, that were 2.3-4.9 years old with body weights in the range of 2-4 kg).

[1314] For Pharmacokinetic Assessments, concentrations of BKM0186 were measured using the MSD electrochemiluminescence (ECL) assay platform. The assay comprises a plate-bound TCR Vβ6 antigen reagent to capture BKM0186 or BKM0281, followed by a two-step biotinylated anti-human IL-2 antibody and streptavidin-Sulfotag-TAG for the detection of the drug complex, with a validated lower limit of quantitation (LLoQ) of 0.05 nM. In brief, plates were coated with 25 uL/well of TCR Vβ6 antigen, incubated overnight at 4° C., followed by blocked using 250 uL/well of PBS containing 3% BSA for 2 hours. Serum samples were diluted 1:50 in PBS-T to fall in the linear range of the standard curve (samples which generated signals that did not fall within the linear range of the standard curve were re-run at either 1:200 for samples above the linear portion; and 1:20 for samples that fell below the linear portion. Samples were added to the plate at 25 uL/well in duplicates and incubated overnight at 4° C. 25 uL/well of the biotinylated anti-IL2 antibody at a final concentration of 5 ug/mL in PBST+1% BSA were added and incubated at room temperature (RT) for 2 hours. Plates were washed, then a 1:1000 dilution of Streptavadin-Sulfo-TAG in PBST was added to the plates at 25 uL/well for 30 mins at RT, then washed. A 1:4 dilution of MSD Read Buffer A in deionized water was as added at 150 uL/well to plates, that were then read on an MSD plate reader. Standard curves used to calculate analyte concentrations were established by fitting the signals from the standard to a 4-parameter logistic (or sigmoidal dose-response) model with a 1/Y\hat{ }2 weighting. The LLOQs were derived from the lowest concentration of the standard curve that met the following criteria: CV % <20, and Recovery % 85-115.

[1315] For Pharmacodynamic Assessments, assessments were undertaken in blood over a range of timepoints. The assessment of Vβ6 CD8+ T cells in blood samples drawn from dosed monkeys was achieved using flow cytometry for the quantification of Vβ6 T cells expansion and activation. T cell activation were measured by the expression of IL 2Ra (CD25) and inflammatory cytokines IFNγ, TNFα, and IL6. For flow cytometry assays, 50 μL of whole blood (for cell surface staining), or 95 μL of whole blood (for intracellular staining) were used per well (96-deep well plate) of staining. Following cell surface staining, 1.5 mL of FACS lysing solution 1× was added to each well and incubated in the dark at RT for 10 minutes. Immediately after the incubation, plates were centrifuged (set at 400×g; 5 minutes; RT), supernatant aspirated and washed with 1700 mL of stain buffer (PBS plus 0.04% BSA). Cell pellets were then resuspended in 0.4 mL of 0.05% formalin solution diluted in FACSFlow and transferred to a 96 well u-bottom plate for analysis. For intracellular staining, prewarmed 1.8 mL of 1×LYSE/FIX buffer was added to each well. The plates were placed in an incubator and set to maintain 37° C. for 15 mins and centrifuged (set at 600×g; 8 mins; RT), washed, and resuspended in 1 mL of cold Perm Buffer III for 30 minutes on wet ice. Antibodies were added to the appropriate sample wells for staining. The plates were incubated in a refrigerator set to maintain 4° in the dark for 60-70 minutes. Following the incubation, plates were washed twice (centrifuge set at 600×g; 8 minutes; 4°), supernatant aspirated and cell pellets were then resuspended in 0.3 mL of stain buffer and transferred to a 96 well u-bottom plate for analysis. Samples were analyzed utilizing the LSRFortessa™ II Flow Cytometer and DIVA® 8.0.1 software. Inflammatory cytokines were measured using the Non-Human Primate cytokine kit (Millipore, #PRCYTOMAG-40k), per manufacturer's instructions, and detected using the Luminex BioPlex Systems.

[1316] FIG. 119A and FIG. 119B (A&B) illustrate concentration-time curves for all IV doses (30 min infusion). Following a rapid distribution phase, both BKM0186 and BKM0281 cleared rapidly from blood in a dose-dependent manner with BKM0281 exhibiting faster clearance compared to BKM0186. Despite fast clearance, both BKM0186 and BKM0281 showed sustained expansion of Vβ6 CD8+ T cells (as a proportion of the total CD8+ T cell compartment) (FIG. 120A and FIG. 120B) for up to 100 hours and serum levels soluble CD25 (sCD25) (FIG. 121), a serum marker of T cell activation, in monkeys administered a single IV dose of BKM0186 and BKM0281 across a dose range. In contrast, a minimal expansion of Treg was observed. The cytokine data supports dose-dependent Test Article effects on MCP-1, MIP1β, IL-10, IL-1RA, IFN-γ (FIG. 123A and FIG. 123B), IL-5, and IL-6 (FIG. 122A and FIG. 122B). The cytokine data supports an uncertain effect on IL-4 and IL-12/23 (p40). Detectible concentrations of both cytokines were present for isolated animals; however, the relationship of these changes to IL2×TCRVβ administration is uncertain due to their sporadic presence and the lack of a clear dose response. There were no Test Article-related effects on IL-8, TNF-α, IL-2, IL-13, IL-15, IL-17, IL-18, GM-CSF, or IL-1β

[1317] While preferred embodiments of the present invention have been shown and described herein, it will be obvious to those skilled in the art that such embodiments are provided by way of example only. Numerous variations, changes, and substitutions will now occur to those skilled in the art without departing from the invention. It should be understood that various alternatives to the embodiments of the invention described herein may be employed in practicing the invention. It is intended that the following claims define the scope of the invention and that methods and structures within the scope of these claims and their equivalents be covered thereby. Those skilled in the art will recognize, or be able to ascertain using no more than routine experimentation, many equivalents to the specific embodiments of the invention described herein. Such equivalents are intended to be encompassed by the following claims.

TABLE 21
Exemplary Construct Sequences

| | | | |
|---|---|---|---|
| | SEQ | | |
| | ID | | |
| Chain | NO: | Component | Sequence |

TCRVβ/IL15-sushi bispecific

| | | | |
|---|---|---|---|
| Chain 1: | 3517 | Full Sequence | QVQLVQSGAEVKKPGSSVKVSCKASGHDFRLTYIHWVRQAPGQG |
| TCRVβ- | | | LEWMGRVSAGSGNVKYNEKFKGRVTITADTSTSTAYMELSSLRS |
| Fc_Hole_Cys_ | | | EDTAVYYCAVSYYSYDVLDYWGQGTTVTVSSASTKGPSVFPLAP |
| N297A heavy | | | SSKSTSGGTAALGCLVKDYFPEPVTVSWNSGALTSGVHTFPAVLQ |
| chain (CDRs | | | SSGLYSLSSVVTVPSSSLGTQTYICNVNHKPSNTKVDKRVEPKSCD |
| underlined) | | | KTHTCPPCPAPELLGGPSVFLFPPKPKDTLMISRTPEVTCVVVDVS |
| | | | HEDPEVKFNWYVDGVEVHNAKTKPREEQYASTYRVVSVLTVLH |
| | | | QDWLNGKEYKCKVSNKALPAPIEKTISKAKGQPREPQVCTLPPSR |
| | | | EEMTKNQVSLSCAVKGFYPSDIAVEWESNGQPENNYKTTPPVLDS |
| | | | DGSFFLVSKLTVDKSRWQQGNVFSCSVMHEALHNHYTQKSLSLS |
| | | | PGK |
| | 1346 | anti-TCRvβ VH | QVQLVQSGAEVKKPGSSVKVSCKASGHDFRLTYIHWVRQAPGQG |
| | | | LEWMGRVSAGSGNVKYNEKFKGRVTITADTSTSTAYMELSSLRS |
| | | | EDTAVYYCAVSYYSYDVLDYWGQGTTVTVSS |
| | 3649 | Human IgG1 | ASTKGPSVFPLAPSSKSTSGGTAALGCLVKDYFPEPVTVSWNSGA |
| | | hole cys N297A | LTSGVHTFPAVLQSSGLYSLSSVVTVPSSSLGTQTYICNVNHKPSN |
| | | | TKVDKRVEPKSCDKTHTCPPCPAPELLGGPSVFLFPPKPKDTLMIS |
| | | | RTPEVTCVVVDVSHEDPEVKFNWYVDGVEVHNAKTKPREEQYA |
| | | | STYRVVSVLTVLHQDWLNGKEYKCKVSNKALPAPIEKTISKAKG |
| | | | QPREPQVCTLPPSREEMTKNQVSLSCAVKGFYPSDIAVEWESNGQ |
| | | | PENNYKTTPPVLDSDGSFFLVSKLTVDKSRWQQGNVFSCSVMHE |
| | | | ALHNHYTQKSLSLSPGK |
| Chain 2: | 3519 | Full Sequence | ITCPPPMSVEHADIWVKSYSLYSRERYICNSGFKRKAGTSSLTECV |
| IL15RA_Sushi- | | | LNKATNVAHWTTPSLKCIRDPALVHQRPAPPSGGSGGGGSGGGS |
| GS linker- | | | GGGGSGGNWVNVISDLKKIEDLIQSMHIDATLYTESDVHPSCKVT |
| IL15-GS | | | AMKCFLLELQVISLESGDASIHDTVENLIILANNSLSSNGNVTESGC |
| linker- | | | KECEELEEKNIKEFLQSFVHIVQMFINTSGGGGSGGGGSDKTHTCP |
| Fc_Knob_Cys_ | | | PCPAPELLGGPSVFLFPPKPKDTLMISRTPEVTCVVVDVSHEDPEV |
| N297A | | | KFNWYVDGVEVHNAKTKPREEQYASTYRVVSVLTVLHQDWLNG |
| | | | KEYKCKVSNKALPAPIEKTISKAKGQPREPQVYTLPPCREEMTKN |
| | | | QVSLWCLVKGFYPSDIAVEWESNGQPENNYKTTPPVLDSDGSFFL |
| | | | YSKLTVDKSRWQQGNVFSCSVMHEALHNHYTQKSLSLSPGK |
| | 3523 | IL15RA Sushi | ITCPPPMSVEHADIWVKSYSLYSRERYICNSGFKRKAGTSSLTECV |
| | | | LNKATNVAHWTTPSLKCIRDPALVHQRPAPP |
| | 3524 | linker | SGGSGGGGSGGGSGGGGSGG |
| | 2170 | human IL-15 | NWVNVISDLKKIEDLIQSMHIDATLYTESDVHPSCKVTAMKCFLL |
| | | | ELQVISLESGDASIHDTVENLIILANNSLSSNGNVTESGCKECEELE |
| | | | EKNIKEFLQSFVHIVQMFINTS |
| | 3308 | linker | GGGGSGGGGS |
| | 3648 | Human Fc Knob | DKTHTCPPCPAPELLGGPSVFLFPPKPKDTLMISRTPEVTCVVVDV |
| | | cys N297A | SHEDPEVKFNWYVDGVEVHNAKTKPREEQYASTYRVVSVLTVLH |
| | | | QDWLNGKEYKCKVSNKALPAPIEKTISKAKGQPREPQVYTLPPCR |
| | | | EEMTKNQVSLWCLVKGFYPSDIAVEWESNGQPENNYKTTPPVLD |
| | | | SDGSFFLYSKLTVDKSRWQQGNVFSCSVMHEALHNHYTQKSLSL |
| | | | SPGK |
| Chain 3: | 3518 | Full Sequence | DIQMTQSPSFLSASVGDRVTITCKASQNVADRVVWHQQKPGKAP |
| TCRVβ light | | | KALIYSSSHRYKGVPSRFSGSGSGTEFTLTISSLQPEDFATYFCQQF |
| chain (CDRs | | | KSYPLTFGQGTKLEIKRTVAAPSVFIFPPSDEQLKSGTASVVCLLN |
| underlined) | | | NFYPREAKVQWKVDNALQSGNSQESVTEQDSKDSTYSLSSTLTLS |
| | | | KADYEKHKVYACEVTHQGLSSPVTKSFNRGEC |
| | 1349 | anti-TCRvβ VL | DIQMTQSPSFLSASVGDRVTITCKASQNVADRVVWHQQKPGKAP |
| | | | KALIYSSSHRYKGVPSRFSGSGSGTEFTLTISSLQPEDFATYFCQQF |
| | | | KSYPLTFGQGTKLEIK |
| | 3644 | Immunoglobulin | RTVAAPSVFIFPPSDEQLKSGTASVVCLLNNFYPREAKVQWKVDN |
| | | kappa constant C | ALQSGNSQESVTEQDSKDSTYSLSSTLTLSKADYEKHKVYACEVT |
| | | region | HQGLSSPVTKSFNRGEC |

TCRVβ/IL15 bispecific

| | | | |
|---|---|---|---|
| Chain 1: | 3517 | Full Sequence | QVQLVQSGAEVKKPGSSVKVSCKASGHDFRLTYIHWVRQAPGQG |
| TCRVβ- | | | LEWMGRVSAGSGNVKYNEKFKGRVTITADTSTSTAYMELSSLRS |
| Fc_Hole_Cys_ | | | EDTAVYYCAVSYYSYDVLDYWGQGTTVTVSSASTKGPSVFPLAP |
| N297A | | | SSKSTSGGTAALGCLVKDYFPEPVTVSWNSGALTSGVHTFPAVLQ |
| heavy chain | | | SSGLYSLSSVVTVPSSSLGTQTYICNVNHKPSNTKVDKRVEPKSCD |
| (CDRs | | | KTHTCPPCPAPELLGGPSVFLFPPKPKDTLMISRTPEVTCVVVDVS |
| underlined) | | | HEDPEVKFNWYVDGVEVHNAKTKPREEQYASTYRVVSVLTVLH |
| | | | QDWLNGKEYKCKVSNKALPAPIEKTISKAKGQPREPQVCTLPPSR |
| | | | EEMTKNQVSLSCAVKGFYPSDIAVEWESNGQPENNYKTTPPVLDS |
| | | | DGSFFLVSKLTVDKSRWQQGNVFSCSVMHEALHNHYTQKSLSLS |
| | | | PGK |
| | 1346 | anti-TCRvβ VH | QVQLVQSGAEVKKPGSSVKVSCKASGHDFRLTYIHWVRQAPGQG |
| | | | LEWMGRVSAGSGNVKYNEKFKGRVTITADTSTSTAYMELSSLRS |
| | | | EDTAVYYCAVSYYSYDVLDYWGQGTTVTVSS |
| | 3649 | Human IgG1 | ASTKGPSVFPLAPSSKSTSGGTAALGCLVKDYFPEPVTVSWNSGA |
| | | hole cys N297A | LTSGVHTFPAVLQSSGLYSLSSVVTVPSSSLGTQTYICNVNHKPSN |
| | | | TKVDKRVEPKSCDKTHTCPPCPAPELLGGPSVFLFPPKPKDTLMIS |
| | | | RTPEVTCVVVDVSHEDPEVKFNWYVDGVEVHNAKTKPREEQYA |
| | | | STYRVVSVLTVLHQDWLNGKEYKCKVSNKALPAPIEKTISKAKG |
| | | | QPREPQVCTLPPSREEMTKNQVSLSCAVKGFYPSDIAVEWESNGQ |
| | | | PENNYKTTPPVLDSDGSFFLVSKLTVDKSRWQQGNVFSCSVMHE |
| | | | ALHNHYTQKSLSLSPGK |
| Chain 2: | 3520 | Full Sequence | NWVNVISDLKKIEDLIQSMHIDATLYTESDVHPSCKVTAMKCFLL |
| IL15-GS | | | ELQVISLESGDASIHDTVENLIILANNSLSSNGNVTESGCKECEELE |
| linker- | | | EKNIKEFLQSFVHIVQMFINTSGGGGSGGGGSDKTHTCPPCPAPEL |
| Fc_Knob_Cys_ | | | LGGPSVFLFPPKPKDTLMISRTPEVTCVVVDVSHEDPEVKFNWYV |
| N297A | | | DGVEVHNAKTKPREEQYASTYRVVSVLTVLHQDWLNGKEYKCK |
| | | | VSNKALPAPIEKTISKAKGQPREPQVYTLPPCREEMTKNQVSLWC |
| | | | LVKGFYPSDIAVEWESNGQPENNYKTTPPVLDSDGSFFLYSKLTV |
| | | | DKSRWQQGNVFSCSVMHEALHNHYTQKSLSLSPGK |
| | 2170 | human IL-15 | NWVNVISDLKKIEDLIQSMHIDATLYTESDVHPSCKVTAMKCFLL |
| | | | ELQVISLESGDASIHDTVENLIILANNSLSSNGNVTESGCKECEELE |
| | | | EKNIKEFLQSFVHIVQMFINTS |
| | 3308 | linker | GGGGSGGGGS |
| | 3648 | Human Fc Knob | DKTHTCPPCPAPELLGGPSVFLFPPKPKDTLMISRTPEVTCVVVDV |
| | | cys N297A | SHEDPEVKFNWYVDGVEVHNAKTKPREEQYASTYRVVSVLTVLH |
| | | | QDWLNGKEYKCKVSNKALPAPIEKTISKAKGQPREPQVYTLPPCR |
| | | | EEMTKNQVSLWCLVKGFYPSDIAVEWESNGQPENNYKTTPPVLD |
| | | | SDGSFFLYSKLTVDKSRWQQGNVFSCSVMHEALHNHYTQKSLSL |
| | | | SPGK |
| Chain 3: | 3518 | Full Sequence | DIQMTQSPSFLSASVGDRVTITCKASQNVADRVVWHQQKPGKAP |
| TCRVβ light | | | KALIYSSSHRYKGVPSRFSGSGSGTEFTLTISSLQPEDFATYFCQQF |
| chain (CDRs | | | KSYPLTFGQGTKLEIKRTVAAPSVFIFPPSDEQLKSGTASVVCLLN |
| underlined) | | | NFYPREAKVQWKVDNALQSGNSQESVTEQDSKDSTYSLSSTLTLS |
| | | | KADYEKHKVYACEVTHQGLSSPVTKSFNRGEC |
| | 1349 | anti-TCRvβ VL | DIQMTQSPSFLSASVGDRVTITCKASQNVADRVVWHQQKPGKAP |
| | | | KALIYSSSHRYKGVPSRFSGSGSGTEFTLTISSLQPEDFATYFCQQF |
| | | | KSYPLTFGQGTKLEIK |
| | 3644 | Immunoglobulin | RTVAAPSVFIFPPSDEQLKSGTASVVCLLNNFYPREAKVQWKVDN |
| | | kappa constant C | ALQSGNSQESVTEQDSKDSTYSLSSTLTLSKADYEKHKVYACEVT |
| | | region | HQGLSSPVTKSFNRGEC |

BKM0186 (FIG. 103A)

| | | | |
|---|---|---|---|
| Chain 1 | 3517 | Full Sequence | QVQLVQSGAEVKKPGSSVKVSCKASGHDFRLTYIHWVRQAPGQG |
| (heavy chain) | | | LEWMGRVSAGSGNVKYNEKFKGRVTITADTSTSTAYMELSSLRS |
| (CDRs | | | EDTAVYYCAVSYYSYDVLDYWGQGTTVTVSSASTKGPSVFPLAP |
| underlined) | | | SSKSTSGGTAALGCLVKDYFPEPVTVSWNSGALTSGVHTFPAVLQ |
| | | | SSGLYSLSSVVTVPSSSLGTQTYICNVNHKPSNTKVDKRVEPKSCD |
| | | | KTHTCPPCPAPELLGGPSVFLFPPKPKDTLMISRTPEVTCVVVDVS |
| | | | HEDPEVKFNWYVDGVEVHNAKTKPREEQYASTYRVVSVLTVLH |
| | | | QDWLNGKEYKCKVSNKALPAPIEKTISKAKGQPREPQVCTLPPSR |
| | | | EEMTKNQVSLSCAVKGFYPSDIAVEWESNGQPENNYKTTPPVLDS |
| | | | DGSFFLVSKLTVDKSRWQQGNVFSCSVMHEALHNHYTQKSLSLS |
| | | | PGK |
| | 1346 | anti-TCRvβ VH | QVQLVQSGAEVKKPGSSVKVSCKASGHDFRLTYIHWVRQAPGQG |
| | | | LEWMGRVSAGSGNVKYNEKFKGRVTITADTSTSTAYMELSSLRS |
| | | | EDTAVYYCAVSYYSYDVLDYWGQGTTVTVSS |
| | 3649 | Human IgG1 | ASTKGPSVFPLAPSSKSTSGGTAALGCLVKDYFPEPVTVSWNSGA |
| | | hole cys N297A | LTSGVHTFPAVLQSSGLYSLSSVVTVPSSSLGTQTYICNVNHKPSN |
| | | | TKVDKRVEPKSCDKTHTCPPCPAPELLGGPSVFLFPPKPKDTLMIS |
| | | | RTPEVTCVVVDVSHEDPEVKFNWYVDGVEVHNAKTKPREEQYA |
| | | | STYRVVSVLTVLHQDWLNGKEYKCKVSNKALPAPIEKTISKAKG |
| | | | QPREPQVCTLPPSREEMTKNQVSLSCAVKGFYPSDIAVEWESNGQ |
| | | | PENNYKTTPPVLDSDGSFFLVSKLTVDKSRWQQGNVFSCSVMHE |
| | | | ALHNHYTQKSLSLSPGK |
| Chain 2 | 3521 | Full Sequence | APTSSSTKKTQLQLEHLLLDLQMILNGINNYKNPKLTRMLTFKFY |
| (IL2-Fc) | | | MPKKATELKHLQCLEEELKPLEEVLNLAQSKNFHLRPRDLISNINV |
| | | | IVLELKGSETTFMCEYADETATIVEFLNRWITFAQSIISTLTGGGGS |
| | | | GGGGSDKTHTCPPCPAPELLGGPSVFLFPPKPKDTLMISRTPEVTC |
| | | | VVVDVSHEDPEVKFNWYVDGVEVHNAKTKPREEQYASTYRVVS |
| | | | VLTVLHQDWLNGKEYKCKVSNKALPAPIEKTISKAKGQPREPQV |
| | | | YTLPPCREEMTKNQVSLWCLVKGFYPSDIAVEWESNGQPENNYK |
| | | | TTPPVLDSDGSFFLYSKLTVDKSRWQQGNVFSCSVMHEALHNHY |
| | | | TQKSLSLSPGK |
| | 2270 | IL-2 C125A | APTSSSTKKTQLQLEHLLLDLQMILNGINNYKNPKLTRMLTFKFY |
| | | | MPKKATELKHLQCLEEELKPLEEVLNLAQSKNFHLRPRDLISNINV |
| | | | IVLELKGSETTFMCEYADETATIVEFLNRWITFAQSIISTLT |
| | 3308 | linker | GGGGSGGGGS |
| | 3648 | Human Fc Knob | DKTHTCPPCPAPELLGGPSVFLFPPKPKDTLMISRTPEVTCVVVDV |
| | | cys N297A | SHEDPEVKFNWYVDGVEVHNAKTKPREEQYASTYRVVSVLTVLH |
| | | | QDWLNGKEYKCKVSNKALPAPIEKTISKAKGQPREPQVYTLPPCR |
| | | | EEMTKNQVSLWCLVKGFYPSDIAVEWESNGQPENNYKTTPPVLD |
| | | | SDGSFFLYSKLTVDKSRWQQGNVFSCSVMHEALHNHYTQKSLSL |
| | | | SPGK |
| Chain 3 | 3518 | Full Sequence | DIQMTQSPSFLSASVGDRVTITCKASQNVADRVVWHQQKPGKAP |
| (light chain) | | | KALIYSSSHRYKGVPSRFSGSGSGTEFTLTISSLQPEDFATYFCQQF |
| (CDRs | | | KSYPLTFGQGTKLEIKRTVAAPSVFIFPPSDEQLKSGTASVVCLLN |
| underlined) | | | NFYPREAKVQWKVDNALQSGNSQESVTEQDSKDSTYSLSSTLTLS |
| | | | KADYEKHKVYACEVTHQGLSSPVTKSFNRGEC |
| | 1349 | anti-TCRvβ VL | DIQMTQSPSFLSASVGDRVTITCKASQNVADRVVWHQQKPGKAP |
| | | | KALIYSSSHRYKGVPSRFSGSGSGTEFTLTISSLQPEDFATYFCQQF |
| | | | KSYPLTFGQGTKLEIK |
| | 3644 | Immunoglobulin | RTVAAPSVFIFPPSDEQLKSGTASVVCLLNNFYPREAKVQWKVDN |
| | | kappa constant C | ALQSGNSQESVTEQDSKDSTYSLSSTLTLSKADYEKHKVYACEVT |
| | | region | HQGLSSPVTKSFNRGEC |

mBKM0186

| | | | |
|---|---|---|---|
| Chain 1 | 3529 | Full Sequence | QVQLQQSGTELMKPGASVKISCKASGYTFSNYWIEWIKQRPGHGL |
| (heavy chain) | | | EWVGEILPGAGPTNYNEKFKGKATFTADSSSNTAYMQLSSLTSED |
| (CDRs | | | SAVYYCARTDYDYDWFAYWGQGTLVTVSAAKTTAPSVYPLAPV |
| underlined) | | | SGDTTGSSVTLGCLVKGYFPEPVTLTWNSGSLSSGVHTFPAVLQS |
| | | | DLYTLSSSVTVTSSTWPSQSITCNVAHPASSTKVDKKIEPKSCDKT |
| | | | HTCPPCPAPNAAGGPSVFIFPPKIKDVLMISLSPIVTCVVVDVSEDD |
| | | | PDVQISWFVNNVEVHTAQTQTHREDYNSTLRVVSALPIQHQDWM |
| | | | SGKEFKCKVNNKDLGAPIERTISKPKGSVRAPQVCVLPPPEEEMTK |
| | | | KQVTLSCAVTDFMPEDIYVEWTNNGKTELNYKNTEPVLDSDGSY |
| | | | FMVSKLRVEKKNWVERNSYSCSVVHEGLHNHHTTKSFSRTPGKE |
| | | | PEA |
| | 3548 | Full Sequence | QVQLQQSGTELMKPGASVKISCKASGYTFSNYWIEWIKQRPGHGL |
| | | without tag | EWVGEILPGAGPTNYNEKFKGKATFTADSSSNTAYMQLSSLTSED |
| | | | SAVYYCARTDYDYDWFAYWGQGTLVTVSAAKTTAPSVYPLAPV |
| | | | SGDTTGSSVTLGCLVKGYFPEPVTLTWNSGSLSSGVHTFPAVLQS |
| | | | DLYTLSSSVTVTSSTWPSQSITCNVAHPASSTKVDKKIEPKSCDKT |
| | | | HTCPPCPAPNAAGGPSVFIFPPKIKDVLMISLSPIVTCVVVDVSEDD |
| | | | PDVQISWFVNNVEVHTAQTQTHREDYNSTLRVVSALPIQHQDWM |
| | | | SGKEFKCKVNNKDLGAPIERTISKPKGSVRAPQVCVLPPPEEEMTK |
| | | | KQVTLSCAVTDFMPEDIYVEWTNNGKTELNYKNTEPVLDSDGSY |
| | | | FMVSKLRVEKKNWVERNSYSCSVVHEGLHNHHTTKSFSRTPGK |
| | 3530 | anti-TCRvβ VH | QVQLQQSGTELMKPGASVKISCKASGYTFSNYWIEWIKQRPGHGL |
| | | from murine | EWVGEILPGAGPTNYNEKFKGKATFTADSSSNTAYMQLSSLTSED |
| | | MR5-2 | SAVYYCARTDYDYDWFAYWGQGTLVTVSAAKTTAPSVYPLAPV |
| | | | SGDTTGSSVTLGCLVKGYFPEPVTLTWNSGSLSSGVHTFPAVLQS |
| | | | DLYTLSSSVTVTSS |
| | 3531 | mouse Fc heavy | TWPSQSITCNVAHPASSTKVDKKIEPKSCDKTHTCPPCPAPNAAGG |
| | | chain | PSVFIFPPKIKDVLMISLSPIVTCVVVDVSEDDPDVQISWFVNNVEV |
| | | comprising | HTAQTQTHREDYNSTLRVVSALPIQHQDWMSGKEFKCKVNNKDL |
| | | LALAPG | GAPIERTISKPKGSVRAPQVCVLPPPEEEMTKKQVTLSCAVTDFMP |
| | | mutations | EDIYVEWTNNGKTELNYKNTEPVLDSDGSYFMVSKLRVEKKNW |
| | | (L234A L235A | VERNSYSCSVVHEGLHNHHTTKSFSRTPGK |
| | | and P329G) | |
| | 3547 | Tag | EPEA |
| Chain 2 | 3532 | Full Sequence | APTSSSTKKTQLQLEHLLLDLQMILNGINNYKNPKLTRMLTFKFY |
| (IL2-Fc) | | | MPKKATELKHLQCLEEELKPLEEVLNLAQSKNFHLRPRDLISNINV |
| | | | IVLELKGSETTFMCEYADETATIVEFLNRWITFCQSIISTLTGGGGS |
| | | | GGGGSDKTHTCPPCPAPNAAGGPSVFIFPPKIKDVLMISLSPIVTCV |
| | | | VVDVSEDDPDVQISWFVNNVEVHTAQTQTHREDYNSTLRVVSAL |
| | | | PIQHQDWMSGKEFKCKVNNKDLGAPIERTISKPKGSVRAPQVYVL |
| | | | PPCEEEMTKKQVTLWCMVTDFMPEDIYVEWTNNGKTELNYKNT |
| | | | EPVLDSDGSYFMYSKLRVEKKNWVERNSYSCSVVHEGLHNHHTT |
| | | | KSFSRTPGKGGGGSHHHHHHHH |
| | 3549 | Full Sequence | APTSSSTKKTQLQLEHLLLDLQMILNGINNYKNPKLTRMLTFKFY |
| | | without tag | MPKKATELKHLQCLEEELKPLEEVLNLAQSKNFHLRPRDLISNINV |
| | | | IVLELKGSETTFMCEYADETATIVEFLNRWITFCQSIISTLTGGGGS |
| | | | GGGGSDKTHTCPPCPAPNAAGGPSVFIFPPKIKDVLMISLSPIVTCV |
| | | | VVDVSEDDPDVQISWFVNNVEVHTAQTQTHREDYNSTLRVVSAL |
| | | | PIQHQDWMSGKEFKCKVNNKDLGAPIERTISKPKGSVRAPQVYVL |
| | | | PPCEEEMTKKQVTLWCMVTDFMPEDIYVEWTNNGKTELNYKNT |
| | | | EPVLDSDGSYFMYSKLRVEKKNWVERNSYSCSVVHEGLHNHHTT |
| | | | KSFSRTPGK |
| | 2191 | IL-2 | APTSSSTKKTQLQLEHLLLDLQMILNGINNYKNPKLTRMLTFKFY |
| | | | MPKKATELKHLQCLEEELKPLEEVLNLAQSKNFHLRPRDLISNINV |
| | | | IVLELKGSETTFMCEYADETATIVEFLNRWITFCQSIISTLT |
| | 3308 | linker | GGGGSGGGGS |
| | 3533 | mouse Fc heavy | DKTHTCPPCPAPNAAGGPSVFIFPPKIKDVLMISLSPIVTCVVVDVS |
| | | chain | EDDPDVQISWFVNNVEVHTAQTQTHREDYNSTLRVVSALPIQHQ |
| | | comprising | DWMSGKEFKCKVNNKDLGAPIERTISKPKGSVRAPQVYVLPPCEE |
| | | LALAPG | EMTKKQVTLWCMVTDFMPEDIYVEWTNNGKTELNYKNTEPVLD |
| | | mutations | SDGSYFMYSKLRVEKKNWVERNSYSCSVVHEGLHNHHTTKSFSR |
| | | (L234A L235A | TPGK |
| | | and P329G) | |
| | 3534 | Tag | GGGGSHHHHHHHH |
| Chain 3 | 3526 | Full Sequence | DIVMSQSPSSLAVSVGEKVTMSCKSSQSLLYSGNQKNYLAWYQQ |
| (light chain) | | | KPGQSPKLLIYWASTRESGVPDRFTGSGSGTDFTLTINSVKAEDLT |
| (CDRs | | | VYYCQQYYGYPRTFGGGTKVEIKRADAAPTVSIFPPSSEQLTSGG |
| underlined) | | | ASVVCFLNNFYPKDINVKWKIDGSERQNGVLNSWTDQDSKDSTY |
| | | | SMSSTLTLTKDEYERHNSYTCEATHKTSTSPIVKSFNRNEC |
| | 3527 | anti-TCRvβ VL | DIVMSQSPSSLAVSVGEKVTMSCKSSQSLLYSGNQKNYLAWYQQ |
| | | from murine | KPGQSPKLLIYWASTRESGVPDRFTGSGSGTDFTLTINSVKAEDLT |
| | | MR5-2 | VYYCQQYYGYPRTFGGGTKVEIK |
| | 3528 | Immunoglobulin | RADAAPTVSIFPPSSEQLTSGGASVVCFLNNFYPKDINVKWKIDGS |
| | | constant region | ERQNGVLNSWTDQDSKDSTYSMSSTLTLTKDEYERHNSYTCEAT |
| | | | HKTSTSPIVKSFNRNEC |

mBKM0281

| | | | |
|---|---|---|---|
| Chain 1 | 3536 | Full Sequence | QVQLQQSGTELMKPGASVKISCKASGYTFSNYWIEWIKQRPGHGL |
| (heavy chain) | | | EWVGEILPGAGPTNYNEKFKGKATFTADSSSNTAYMQLSSLTSED |
| (CDRs | | | SAVYYCARTDYDYDWFAYWGQGTLVTVSAAKTTAPSVYPLAPV |
| underlined) | | | SGDTTGSSVTLGCLVKGYFPEPVTLTWNSGSLSSGVHTFPAVLQS |
| | | | DLYTLSSSVTVTSSTWPSQSITCNVAHPASSTKVDKKIEPKSCDKT |
| | | | HTCPPCPAPNAAGGPSVFIFPPKIKDVLMISLSPIVTCVVVDVSEDD |
| | | | PDVQISWFVNNVEVHTAQTQTHREDYNSTLRVVSALPIQHQDWM |
| | | | SGKEFKCKVNNKDLGAPIERTISKPKGSVRAPQVYVLPPPEEEMTK |
| | | | KQVTLTCMVTDFMPEDIYVEWTNNGKTELNYKNTEPVLDSDGSY |
| | | | FMYSKLRVEKKNWVERNSYSCSVVHEGLHNHHTTKSFSRTPGKE |
| | | | PEA |
| | 3530 | anti-TCRvβ VH | QVQLQQSGTELMKPGASVKISCKASGYTFSNYWIEWIKQRPGHGL |
| | | from murine | EWVGEILPGAGPTNYNEKFKGKATFTADSSSNTAYMQLSSLTSED |
| | | MR5-2 | SAVYYCARTDYDYDWFAYWGQGTLVTVSAAKTTAPSVYPLAPV |
| | | | SGDTTGSSVTLGCLVKGYFPEPVTLTWNSGSLSSGVHTFPAVLQS |
| | | | DLYTLSSSVTVTSS |
| | 3537 | mouse Fc heavy | TWPSQSITCNVAHPASSTKVDKKIEPKSCDKTHTCPPCPAPNAAGG |
| | | chain | PSVFIFPPKIKDVLMISLSPIVTCVVVDVSEDDPDVQISWFVNNVEV |
| | | comprising | HTAQTQTHREDYNSTLRVVSALPIQHQDWMSGKEFKCKVNNKDL |
| | | LALAPG | GAPIERTISKPKGSVRAPQVYVLPPPEEEMTKKQVTLTCMVTDFM |
| | | mutations | PEDIYVEWTNNGKTELNYKNTEPVLDSDGSYFMYSKLRVEKKNW |
| | | (L234A L235A | VERNSYSCSVVHEGLHNHHTTKSFSRTPGKEPEA |
| | | and P329G) | |
| Chain 2 | 3535 | Full Sequence | DIVMSQSPSSLAVSVGEKVTMSCKSSQSLLYSGNQKNYLAWYQQ |
| (light chain- | | | KPGQSPKLLIYWASTRESGVPDRFTGSGSGTDFTLTINSVKAEDLT |
| IL2) | | | VYYCQQYYGYPRTFGGGTKVEIKRADAAPTVSIFPPSSEQLTSGG |
| (CDRs | | | ASVVCFLNNFYPKDINVKWKIDGSERQNGVLNSWTDQDSKDSTY |
| underlined) | | | SMSSTLTLTKDEYERHNSYTCEATHKTSTSPIVKSFNRNECGGGGS |
| | | | GGGGSGGGGSAPTSSSTKKTQLQLEHLLLDLQMILNGINNYKNPK |
| | | | LTRMLTFKFYMPKKATELKHLQCLEEELKPLEEVLNLAQSKNFHL |
| | | | RPRDLISNINVIVLELKGSETTFMCEYADETATIVEFLNRWITFCQSI |
| | | | ISTLT |
| | 3527 | anti-TCRvβ VL | DIVMSQSPSSLAVSVGEKVTMSCKSSQSLLYSGNQKNYLAWYQQ |
| | | from murine | KPGQSPKLLIYWASTRESGVPDRFTGSGSGTDFTLTINSVKAEDLT |
| | | MR5-2 | VYYCQQYYGYPRTFGGGTKVEIK |
| | 3528 | Immunoglobulin | RADAAPTVSIFPPSSEQLTSGGASVVCFLNNFYPKDINVKWKIDGS |
| | | constant region | ERQNGVLNSWTDQDSKDSTYSMSSTLTLTKDEYERHNSYTCEAT |
| | | | HKTSTSPIVKSFNRNEC |
| | 3309 | linker | GGGGSGGGGSGGGGS |
| | 2191 | IL-2 | APTSSSTKKTQLQLEHLLLDLQMILNGINNYKNPKLTRMLTFKFY |
| | | | MPKKATELKHLQCLEEELKPLEEVLNLAQSKNFHLRPRDLISNINV |
| | | | IVLELKGSETTFMCEYADETATIVEFLNRWITFCQSIISTLT |

BMM0317 (IL-7)

| | | | |
|---|---|---|---|
| Chain 1: | 3517 | Full Sequence | QVQLVQSGAEVKKPGSSVKVSCKASGHDFRLTYIHWVRQAPGQG |
| TCRVβ- | | | LEWMGRVSAGSGNVKYNEKFKGRVTITADTSTSTAYMELSSLRS |
| Fc_Hole_Cys_ | | | EDTAVYYCAVSYYSYDVLDYWGQGTTVTVSSASTKGPSVFPLAP |
| N297A heavy | | | SSKSTSGGTAALGCLVKDYFPEPVTVSWNSGALTSGVHTFPAVLQ |
| chain (CDRs | | | SSGLYSLSSVVTVPSSSLGTQTYICNVNHKPSNTKVDKRVEPKSCD |
| underlined) | | | KTHTCPPCPAPELLGGPSVFLFPPKPKDTLMISRTPEVTCVVVDVS |
| | | | HEDPEVKFNWYVDGVEVHNAKTKPREEQYASTYRVVSVLTVLH |
| | | | QDWLNGKEYKCKVSNKALPAPIEKTISKAKGQPREPQVCTLPPSR |
| | | | EEMTKNQVSLSCAVKGFYPSDIAVEWESNGQPENNYKTTPPVLDS |
| | | | DGSFFLVSKLTVDKSRWQQGNVFSCSVMHEALHNHYTQKSLSLS |
| | | | PGK |
| | 1346 | anti-TCRvβ VH | QVQLVQSGAEVKKPGSSVKVSCKASGHDFRLTYIHWVRQAPGQG |
| | | | LEWMGRVSAGSGNVKYNEKFKGRVTITADTSTSTAYMELSSLRS |
| | | | EDTAVYYCAVSYYSYDVLDYWGQGTTVTVSS |
| | 3649 | Human IgG1 | ASTKGPSVFPLAPSSKSTSGGTAALGCLVKDYFPEPVTVSWNSGA |
| | | hole cys N297A | LTSGVHTFPAVLQSSGLYSLSSVVTVPSSSLGTQTYICNVNHKPSN |
| | | | TKVDKRVEPKSCDKTHTCPPCPAPELLGGPSVFLFPPKPKDTLMIS |
| | | | RTPEVTCVVVDVSHEDPEVKFNWYVDGVEVHNAKTKPREEQYA |
| | | | STYRVVSVLTVLHQDWLNGKEYKCKVSNKALPAPIEKTISKAKG |
| | | | QPREPQVCTLPPSREEMTKNQVSLSCAVKGFYPSDIAVEWESNGQ |
| | | | PENNYKTTPPVLDSDGSFFLVSKLTVDKSRWQQGNVFSCSVMHE |
| | | | ALHNHYTQKSLSLSPGK |
| Chain 2: | 3539 | Full Sequence | DCDIEGKDGKQYESVLMVSIDQLLDSMKEIGSNCLNNEFNFFKRHI |
| IL-7-GS | | | CDANKEGMFLFRAARKLRQFLKMNSTGDFDLHLLKVSEGTTILLN |
| linker-IL15- | | | CTGQVKGRKPAALGEAQPTKSLEENKSLKEQKKLNDLCFLKRLL |
| GS linker- | | | QEIKTCWNKILMGTKEHGGGGSGGGGSDKTHTCPPCPAPELLGGP |
| Fc_Knob_Cys_ | | | SVFLFPPKPKDTLMISRTPEVTCVVVDVSHEDPEVKFNWYVDGVE |
| N297A | | | VHNAKTKPREEQYASTYRVVSVLTVLHQDWLNGKEYKCKVSNK |
| | | | ALPAPIEKTISKAKGQPREPQVYTLPPCREEMTKNQVSLWCLVKG |
| | | | FYPSDIAVEWESNGQPENNYKTTPPVLDSDGSFFLYSKLTVDKSR |
| | | | WQQGNVFSCSVMHEALHNHYTQKSLSLSPGK |
| | 3540 | IL-7 | DCDIEGKDGKQYESVLMVSIDQLLDSMKEIGSNCLNNEFNFFKRHI |
| | | | CDANKEGMFLFRAARKLRQFLKMNSTGDFDLHLLKVSEGTTILLN |
| | | | CTGQVKGRKPAALGEAQPTKSLEENKSLKEQKKLNDLCFLKRLL |
| | | | QEIKTCWNKILMGTKEH |
| | 3308 | linker | GGGGSGGGGS |
| | 3648 | Human Fc Knob | DKTHTCPPCPAPELLGGPSVFLFPPKPKDTLMISRTPEVTCVVVDV |
| | | cys N297A | SHEDPEVKFNWYVDGVEVHNAKTKPREEQYASTYRVVSVLTVLH |
| | | | QDWLNGKEYKCKVSNKALPAPIEKTISKAKGQPREPQVYTLPPCR |
| | | | EEMTKNQVSLWCLVKGFYPSDIAVEWESNGQPENNYKTTPPVLD |
| | | | SDGSFFLYSKLTVDKSRWQQGNVFSCSVMHEALHNHYTQKSLSL |
| | | | SPGK |
| Chain 3: | 3518 | Full Sequence | DIQMTQSPSFLSASVGDRVTITCKASQNVADRVVWHQQKPGKAP |
| TCRVβ light | | | KALIYSSSHRYKGVPSRFSGSGSGTEFTLTISSLQPEDFATYFCQQF |
| chain (CDRs | | | KSYPLTFGQGTKLEIKRTVAAPSVFIFPPSDEQLKSGTASVVCLLN |
| underlined) | | | NFYPREAKVQWKVDNALQSGNSQESVTEQDSKDSTYSLSSTLTLS |
| | | | KADYEKHKVYACEVTHQGLSSPVTKSFNRGEC |
| | 1349 | anti-TCRvβ VL | DIQMTQSPSFLSASVGDRVTITCKASQNVADRVVWHQQKPGKAP |
| | | | KALIYSSSHRYKGVPSRFSGSGSGTEFTLTISSLQPEDFATYFCQQF |
| | | | KSYPLTFGQGTKLEIK |
| | 3644 | Immunoglobulin | RTVAAPSVFIFPPSDEQLKSGTASVVCLLNNFYPREAKVQWKVDN |
| | | kappa constant C | ALQSGNSQESVTEQDSKDSTYSLSSTLTLSKADYEKHKVYACEVT |
| | | region | HQGLSSPVTKSFNRGEC |

BLM0319 (IL-12)

| | | | |
|---|---|---|---|
| Chain 1: | 3517 | Full Sequence | QVQLVQSGAEVKKPGSSVKVSCKASGHDFRLTYIHWVRQAPGQG |
| TCRVβ- | | | LEWMGRVSAGSGNVKYNEKFKGRVTITADTSTSTAYMELSSLRS |
| Fc_Hole_Cys_ | | | EDTAVYYCAVSYYSYDVLDYWGQGTTVTVSSASTKGPSVFPLAP |
| N297A heavy | | | SSKSTSGGTAALGCLVKDYFPEPVTVSWNSGALTSGVHTFPAVLQ |
| chain (CDRs | | | SSGLYSLSSVVTVPSSSLGTQTYICNVNHKPSNTKVDKRVEPKSCD |
| underlined) | | | KTHTCPPCPAPELLGGPSVFLFPPKPKDTLMISRTPEVTCVVVDVS |
| | | | HEDPEVKFNWYVDGVEVHNAKTKPREEQYASTYRVVSVLTVLH |
| | | | QDWLNGKEYKCKVSNKALPAPIEKTISKAKGQPREPQVCTLPPSR |
| | | | EEMTKNQVSLSCAVKGFYPSDIAVEWESNGQPENNYKTTPPVLDS |
| | | | DGSFFLVSKLTVDKSRWQQGNVFSCSVMHEALHNHYTQKSLSLS |
| | | | PGK |
| | 1346 | anti-TCRvβ VH | QVQLVQSGAEVKKPGSSVKVSCKASGHDFRLTYIHWVRQAPGQG |
| | | | LEWMGRVSAGSGNVKYNEKFKGRVTITADTSTSTAYMELSSLRS |
| | | | EDTAVYYCAVSYYSYDVLDYWGQGTTVTVSS |
| | 3649 | Human IgG1 | ASTKGPSVFPLAPSSKSTSGGTAALGCLVKDYFPEPVTVSWNSGA |
| | | hole cys N297A | LTSGVHTFPAVLQSSGLYSLSSVVTVPSSSLGTQTYICNVNHKPSN |
| | | | TKVDKRVEPKSCDKTHTCPPCPAPELLGGPSVFLFPPKPKDTLMIS |
| | | | RTPEVTCVVVDVSHEDPEVKFNWYVDGVEVHNAKTKPREEQYA |
| | | | STYRVVSVLTVLHQDWLNGKEYKCKVSNKALPAPIEKTISKAKG |
| | | | QPREPQVCTLPPSREEMTKNQVSLSCAVKGFYPSDIAVEWESNGQ |
| | | | PENNYKTTPPVLDSDGSFFLVSKLTVDKSRWQQGNVFSCSVMHE |
| | | | ALHNHYTQKSLSLSPGK |
| Chain 2: | 3541 | Full Sequence | IWELKKDVYVVELDWYPDAPGEMVVLTCDTPEEDGITWTLDQSS |
| IL-12-GS | | | EVLGSGKTLTIQVKEFGDAGQYTCHKGGEVLSHSLLLLHKKEDGI |
| linker-IL15- | | | WSTDILKDQKEPKNKTFLRCEAKNYSGRFTCWWLTTISTDLTFSV |
| GS linker- | | | KSSRGSSDPQGVTCGAATLSAERVRGDNKEYEYSVECQEDSACPA |
| Fc_Knob_Cys_ | | | AEESLPIEVMVDAVHKLKYENYTSSFFIRDIIKPDPPKNLQLKPLKN |
| N297A | | | SRQVEVSWEYPDTWSTPHSYFSLTFCVQVQGKSKREKKDRVFTD |
| | | | KTSATVICRKNASISVRAQDRYYSSSWSEWASVPCSGGGGSGGGG |
| | | | SGGGGSRNLPVATPDPGMFPCLHHSQNLLRAVSNMLQKARQTLE |
| | | | FYPCTSEEIDHEDITKDKTSTVEACLPLELTKNESCLNSRETSFITNG |
| | | | SCLASRKTSFMMALCLSSIYEDLKMYQVEFKTMNAKLLMDPKRQ |
| | | | IFLDQNMLAVIDELMQALNFNSETVPQKSSLEEPDFYKTKIKLCILL |
| | | | HAFRIRAVTIDRVMSYLNASGGGGSGGGGSDKTHTCPPCPAPELL |
| | | | GGPSVFLFPPKPKDTLMISRTPEVTCVVVDVSHEDPEVKFNWYVD |
| | | | GVEVHNAKTKPREEQYASTYRVVSVLTVLHQDWLNGKEYKCKV |
| | | | SNKALPAPIEKTISKAKGQPREPQVYTLPPCREEMTKNQVSLWCL |
| | | | VKGFYPSDIAVEWESNGQPENNYKTTPPVLDSDGSFFLYSKLTVD |
| | | | KSRWQQGNVFSCSVMHEALHNHYTQKSLSLSPGK |
| | 3542 | IL-12 | IWELKKDVYVVELDWYPDAPGEMVVLTCDTPEEDGITWTLDQSS |
| | | | EVLGSGKTLTIQVKEFGDAGQYTCHKGGEVLSHSLLLLHKKEDGI |
| | | | WSTDILKDQKEPKNKTFLRCEAKNYSGRFTCWWLTTISTDLTFSV |
| | | | KSSRGSSDPQGVTCGAATLSAERVRGDNKEYEYSVECQEDSACPA |
| | | | AEESLPIEVMVDAVHKLKYENYTSSFFIRDIIKPDPPKNLQLKPLKN |
| | | | SRQVEVSWEYPDTWSTPHSYFSLTFCVQVQGKSKREKKDRVFTD |
| | | | KTSATVICRKNASISVRAQDRYYSSSWSEWASVPCSGGGGSGGGG |
| | | | SGGGGSRNLPVATPDPGMFPCLHHSQNLLRAVSNMLQKARQTLE |
| | | | FYPCTSEEIDHEDITKDKTSTVEACLPLELTKNESCLNSRETSFITNG |
| | | | SCLASRKTSFMMALCLSSIYEDLKMYQVEFKTMNAKLLMDPKRQ |
| | | | IFLDQNMLAVIDELMQALNFNSETVPQKSSLEEPDFYKTKIKLCILL |
| | | | HAFRIRAVTIDRVMSYLNAS |
| | 3543 | IL-12 beta | IWELKKDVYVVELDWYPDAPGEMVVLTCDTPEEDGITWTLDQSS |
| | | subunit | EVLGSGKTLTIQVKEFGDAGQYTCHKGGEVLSHSLLLLHKKEDGI |
| | | | WSTDILKDQKEPKNKTFLRCEAKNYSGRFTCWWLTTISTDLTFSV |
| | | | KSSRGSSDPQGVTCGAATLSAERVRGDNKEYEYSVECQEDSACPA |
| | | | AEESLPIEVMVDAVHKLKYENYTSSFFIRDIIKPDPPKNLQLKPLKN |
| | | | SRQVEVSWEYPDTWSTPHSYFSLTFCVQVQGKSKREKKDRVFTD |
| | | | KTSATVICRKNASISVRAQDRYYSSSWSEWASVPC |
| | 3544 | Linker | SGGGGSGGGGSGGGGS |
| | 3545 | IL-12 alpha | RNLPVATPDPGMFPCLHHSQNLLRAVSNMLQKARQTLEFYPCTSE |
| | | subunit | EIDHEDITKDKTSTVEACLPLELTKNESCLNSRETSFITNGSCLASR |
| | | | KTSFMMALCLSSIYEDLKMYQVEFKTMNAKLLMDPKRQIFLDQN |
| | | | MLAVIDELMQALNFNSETVPQKSSLEEPDFYKTKIKLCILLHAFRIR |
| | | | AVTIDRVMSYLNAS |
| | 3308 | linker | GGGGSGGGGS |
| | 3648 | Human Fc Knob | DKTHTCPPCPAPELLGGPSVFLFPPKPKDTLMISRTPEVTCVVVDV |
| | | cys N297A | SHEDPEVKFNWYVDGVEVHNAKTKPREEQYASTYRVVSVLTVLH |
| | | | QDWLNGKEYKCKVSNKALPAPIEKTISKAKGQPREPQVYTLPPCR |
| | | | EEMTKNQVSLWCLVKGFYPSDIAVEWESNGQPENNYKTTPPVLD |
| | | | SDGSFFLYSKLTVDKSRWQQGNVFSCSVMHEALHNHYTQKSLSL |
| | | | SPGK |
| Chain 3: | 3518 | Full Sequence | DIQMTQSPSFLSASVGDRVTITCKASQNVADRVVWHQQKPGKAP |
| TCRVβ light | | | KALIYSSSHRYKGVPSRFSGSGSGTEFTLTISSLQPEDFATYFCQQF |
| chain (CDRs | | | KSYPLTFGQGTKLEIKRTVAAPSVFIFPPSDEQLKSGTASVVCLLN |
| underlined) | | | NFYPREAKVQWKVDNALQSGNSQESVTEQDSKDSTYSLSSTLTLS |
| | | | KADYEKHKVYACEVTHQGLSSPVTKSFNRGEC |
| | 1349 | anti-TCRvβ VL | DIQMTQSPSFLSASVGDRVTITCKASQNVADRVVWHQQKPGKAP |
| | | | KALIYSSSHRYKGVPSRFSGSGSGTEFTLTISSLQPEDFATYFCQQF |
| | | | KSYPLTFGQGTKLEIK |
| | 3644 | Immunoglobulin | RTVAAPSVFIFPPSDEQLKSGTASVVCLLNNFYPREAKVQWKVDN |
| | | kappa constant C | ALQSGNSQESVTEQDSKDSTYSLSSTLTLSKADYEKHKVYACEVT |
| | | region | HQGLSSPVTKSFNRGEC |

BLM0321 (IL-21)

| | | | |
|---|---|---|---|
| Chain 1: | 3517 | Full Sequence | QVQLVQSGAEVKKPGSSVKVSCKASGHDFRLTYIHWVRQAPGQG |
| TCRVβ- | | | LEWMGRVSAGSGNVKYNEKFKGRVTITADTSTSTAYMELSSLRS |
| Fc_Hole_Cys_ | | | EDTAVYYCAVSYYSYDVLDYWGQGTTVTVSSASTKGPSVFPLAP |
| N297A heavy | | | SSKSTSGGTAALGCLVKDYFPEPVTVSWNSGALTSGVHTFPAVLQ |
| chain (CDRs | | | SSGLYSLSSVVTVPSSSLGTQTYICNVNHKPSNTKVDKRVEPKSCD |
| underlined) | | | KTHTCPPCPAPELLGGPSVFLFPPKPKDTLMISRTPEVTCVVVDVS |
| | | | HEDPEVKFNWYVDGVEVHNAKTKPREEQYASTYRVVSVLTVLH |
| | | | QDWLNGKEYKCKVSNKALPAPIEKTISKAKGQPREPQVCTLPPSR |
| | | | EEMTKNQVSLSCAVKGFYPSDIAVEWESNGQPENNYKTTPPVLDS |
| | | | DGSFFLVSKLTVDKSRWQQGNVFSCSVMHEALHNHYTQKSLSLS |
| | | | PGK |
| | 1346 | anti-TCRVβ VH | QVQLVQSGAEVKKPGSSVKVSCKASGHDFRLTYIHWVRQAPGQG |
| | | | LEWMGRVSAGSGNVKYNEKFKGRVTITADTSTSTAYMELSSLRS |
| | | | EDTAVYYCAVSYYSYDVLDYWGQGTTVTVSS |
| | 3649 | Human IgG1 | ASTKGPSVFPLAPSSKSTSGGTAALGCLVKDYFPEPVTVSWNSGA |
| | | hole cys N297A | LTSGVHTFPAVLQSSGLYSLSSVVTVPSSSLGTQTYICNVNHKPSN |
| | | | TKVDKRVEPKSCDKTHTCPPCPAPELLGGPSVFLFPPKPKDTLMIS |
| | | | RTPEVTCVVVDVSHEDPEVKFNWYVDGVEVHNAKTKPREEQYA |
| | | | STYRVVSVLTVLHQDWLNGKEYKCKVSNKALPAPIEKTISKAKG |
| | | | QPREPQVCTLPPSREEMTKNQVSLSCAVKGFYPSDIAVEWESNGQ |
| | | | PENNYKTTPPVLDSDGSFFLVSKLTVDKSRWQQGNVFSCSVMHE |
| | | | ALHNHYTQKSLSLSPGK |
| Chain 2: | 3546 | Full Sequence | QGQDRHMIRMRQLIDIVDQLKNYVNDLVPEFLPAPEDVETNCEW |
| IL-21-GS | | | SAFSCFQKAQLKSANTGNNERIINVSIKKLKRKPPSTNAGRRQKHR |
| linker-IL15- | | | LTCPSCDSYEKKPPKEFLERFKSLLQKMIHQHLSSRTHGSEDSGGG |
| GS linker- | | | GSGGGGSDKTHTCPPCPAPELLGGPSVFLFPPKPKDTLMISRTPEV |
| Fc Knob_Cys_ | | | TCVVVDVSHEDPEVKFNWYVDGVEVHNAKTKPREEQYASTYRV |
| N297A | | | VSVLTVLHQDWLNGKEYKCKVSNKALPAPIEKTISKAKGQPREPQ |
| | | | VYTLPPCREEMTKNQVSLWCLVKGFYPSDIAVEWESNGQPENNY |
| | | | KTTPPVLDSDGSFFLYSKLTVDKSRWQQGNVFSCSVMHEALHNH |
| | | | YTQKSLSLSPGK |
| | 2193 | IL-21 | QGQDRHMIRMRQLIDIVDQLKNYVNDLVPEFLPAPEDVETNCEW |
| | | | SAFSCFQKAQLKSANTGNNERIINVSIKKLKRKPPSTNAGRRQKHR |
| | | | LTCPSCDSYEKKPPKEFLERFKSLLQKMIHQHLSSRTHGSEDS |
| | 3308 | linker | GGGGSGGGGS |
| | 3648 | Human Fc Knob | DKTHTCPPCPAPELLGGPSVFLFPPKPKDTLMISRTPEVTCVVVDV |
| | | cys N297A | SHEDPEVKFNWYVDGVEVHNAKTKPREEQYASTYRVVSVLTVLH |
| | | | QDWLNGKEYKCKVSNKALPAPIEKTISKAKGQPREPQVYTLPPCR |
| | | | EEMTKNQVSLWCLVKGFYPSDIAVEWESNGQPENNYKTTPPVLD |
| | | | SDGSFFLYSKLTVDKSRWQQGNVFSCSVMHEALHNHYTQKSLSL |
| | | | SPGK |
| Chain 3: | 3518 | Full Sequence | DIQMTQSPSFLSASVGDRVTITCKASQNVADRVVWHQQKPGKAP |
| TCRVβ light | | | KALIYSSSHRYKGVPSRFSGSGSGTEFTLTISSLQPEDFATYFCQQF |
| chain (CDRs | | | KSYPLTFGQGTKLEIKRTVAAPSVFIFPPSDEQLKSGTASVVCLLN |
| underlined) | | | NFYPREAKVQWKVDNALQSGNSQESVTEQDSKDSTYSLSSTLTLS |
| | | | KADYEKHKVYACEVTHQGLSSPVTKSFNRGEC |
| | 1349 | anti-TCRvβ VL | DIQMTQSPSFLSASVGDRVTITCKASQNVADRVVWHQQKPGKAP |
| | | | KALIYSSSHRYKGVPSRFSGSGSGTEFTLTISSLQPEDFATYFCQQF |
| | | | KSYPLTFGQGTKLEIK |
| | 3644 | Immunoglobulin | RTVAAPSVFIFPPSDEQLKSGTASVVCLLNNFYPREAKVQWKVDN |
| | | kappa constant C | ALQSGNSQESVTEQDSKDSTYSLSSTLTLSKADYEKHKVYACEVT |
| | | region | HQGLSSPVTKSFNRGEC |

### EXEMPLARY EMBODIMENTS

[1318] In some embodiments, binding of the multifunctional polypeptide molecule as described herein to the TCRβV region results in a cytokine profile that differs from a cytokine profile of a T cell engager that binds to a receptor or molecule other than a TCRβV region (non-TCRβV-binding T cell engager). IN some embodiments, the non-TCRβV-binding T cell engager comprises an antibody that binds to a CD3 molecule (e.g., CD3 epsilon (CD3e) molecule); or a TCR alpha (TCRα) molecule.

[1319] In some embodiments, the multifunctional polypeptide molecule as described herein further comprises one or more of: a tumor-targeting moiety, a cytokine molecule, a stromal modifying moiety, or an anti-TCRβV antibody molecule other than the first moiety.

[1320] In some embodiments, the cytokine profile resulted in by binding of the multifunctional polypeptide molecule as described herein to the TCRβV region comprises, one, two, three, four, five, six, seven, or all of the following: (i) increased level, e.g., expression level, and/or activity of IL-2; (ii) reduced level, e.g., expression level, and/or activity of IL-1β; (iii) reduced level, e.g., expression level, and/or activity of IL-6; (iv) reduced level, e.g., expression level, and/or activity of TNFα; (v) reduced level, e.g., expression level, and/or activity of IL-10; (vi) a delay, e.g., at least 1, 2, 3, 4, 5, 6, 7, 8, 9, 10 or more hours delay, in increased level, e.g., expression level, and/or activity of IL-2; (vii) a delay, e.g., at least 1, 2, 3, 4, 5, 6, 7, 8, 9, 10 hours delay, in increased level, e.g., expression level, and/or activity of IFNg; or (viii) increased level, e.g., expression level, and/or activity of IL-15, e.g., wherein (i)-(viii) are relative to the cytokine profile of the non-TCRβV-binding T cell engager.

[1321] In some embodiments, binding of the multifunctional polypeptide molecule as described herein to the TCRβV region results in reduced cytokine storm, e.g., reduced cytokine release syndrome (CRS), as measured by an assay of Example 3, e.g., relative to the cytokine storm induced by the non-TCRβV-binding T cell engager.

[1322] In some embodiments, binding of the multifunctional polypeptide molecule as described herein to the TCRβV region results in one, two, three or all of: (i) reduced T cell proliferation kinetics; (ii) cell killing, e.g., target cell killing, e.g. cancer cell killing, e.g., as measured by an assay of Example 4; (iii) increased Natural Killer (NK) cell proliferation, e.g., expansion; or (vi) expansion, e.g., at least about 1.1-10 fold expansion (e.g., at least about 1.1, 1.2, 1.3, 1.4, 1.5, 2, 3, 4, 5, 6, 7, 8, 9, or 10 fold expansion), of a population of T cells having a memory-like phenotype, e.g., wherein (ix)-(xii) are relative to the non-TCRβV-binding T cell engager. In some embodiments, the population of T cells having a memory-like phenotype comprises CD45RA+ CCR7− T cells, e.g., CD4+ and/or CD8+ T cells.

[1323] In some embodiments, the multifunctional polypeptide molecule as described herein binds to one or more of a TCRβV subfamily chosen from: (i) TCRβ V6 subfamily comprising, e.g., one or more of TCRβ V6-4*01, TCRβ V6-4*02, TCRβ V6-9*01, TCRβ V6-8*01, TCRβ V6-5*01, TCRβ V6-6*02, TCRβ V6-6*01, TCRβ V6-2*01, TCRβ V6-3*01 or TCRβ V6-1*01; (ii) TCRβ V10 subfamily comprising, e.g., one or more of TCRβ V10-1*01, TCRβ V10-1*02, TCRβ V10-3*01 or TCRβ V10-2*01; (iii) TCRβ V5 subfamily comprising, e.g., one or more of TCRβ V5-6*01, TCRβ V5-4*01, TCRβ V5-1*01 or TCRβ V5-8*01; (iv) TCRβ V12 subfamily comprising, e.g., one or more of TCRβ V12-4*01, TCRβ V12-3*01, or TCRβ V12-5*01; (v) TCRβ V27 subfamily; (vi) TCRβ V28 subfamily; (vii) TCRβ V4 subfamily comprising, e.g., one or more of TCRβ V4-1, TCRβ V4-2 or TCRβ V4-3; (viii) TCRβ V19 subfamily; (ix) TCRβ V9 subfamily; or (x) TCRβ V11 subfamily comprising, e.g., TCRβ V1 1-2.

[1324] In some embodiments, the multifunctional polypeptide molecule as described herein comprises the anti-TCRβV antibody molecule: (i) binds specifically to an epitope on TCRβV, e.g., the same or similar epitope as the epitope recognized by an anti-TCRβV antibody molecule as described herein, e.g., a second anti-TCRβV antibody molecule; (ii) shows the same or similar binding affinity or specificity, or both, as an anti-TCRβV antibody molecule as described herein, e.g., a second anti-TCRβV antibody molecule; (iii) inhibits, e.g., competitively inhibits, the binding of an anti-TCRβV antibody molecule as described herein, e.g., a second anti-TCRβV antibody molecule; or (iv) binds the same or an overlapping epitope with an anti-TCRβV antibody molecule as described herein, e.g., a second anti-TCRβV antibody molecule.

[1325] In some embodiments, the multifunctional polypeptide molecule as described herein comprises an antibody molecule chosen from a bispecific antibody molecule, a bivalent antibody molecule, or a biparatopic antibody molecule.

[1326] In some embodiments, the multifunctional polypeptide molecule as described herein comprises a bispecific antibody molecule that binds to two different TCRβV subfamily members.

[1327] In some embodiments, the multifunctional polypeptide molecule as described herein comprises an anti-TCRβV antibody molecule comprising a heavy chain comprising a framework region, e.g., framework region 3 (FR3), comprising one or both of: (i) a Threonine at position 73, e.g., a substitution at position 73 according to Kabat numbering, e.g., a Glutamic Acid to Threonine substitution; or (ii) a Glycine a position 94, e.g., a substitution at position 94 according to Kabat numbering, e.g., a Arginine to Glycine substitution; wherein the substitution is relative to a human germline heavy chain framework region sequence.

[1328] In some embodiments, the multifunctional polypeptide molecule as described herein comprises an anti-TCRβV antibody molecule comprises a light chain comprising a framework region, e.g., framework region 1 (FR1), comprising a Phenyalanine at position 10, e.g., a substitution at position 10 according to Kabat numbering, e.g., a Serine to Phenyalanine substitution, wherein the substitution is relative to a human germline light chain framework region sequence.

[1329] In some embodiments, the multifunctional polypeptide molecule as described herein comprises an anti-TCRβV antibody molecule comprises a light chain comprising a framework region, e.g., framework region 2 (FR2), comprising one or both of: (i) a Histidine at position 36, e.g., a substitution at position 36 according to Kabat numbering, e.g., a Tyrosine to Histidine substitution; or (ii) an Alanine at position 46, e.g., a substitution at position 46 according to Kabat numbering, e.g., a Arginine to Alanine substitution; wherein the substitution is relative to a human germline light chain framework region sequence.

[1330] In some embodiments, the multifunctional polypeptide molecule as described herein comprises an anti-TCRβV antibody molecule comprises a light chain comprising a framework region, e.g., framework region 3 (FR3), comprising a Phenyalanine at position 87, e.g., a substitution at position 87 according to Kabat numbering, e.g., a Tyrosine to Phenyalanine substitution, wherein the substitution is relative to a human germline light chain framework region sequence.

[1331] In some embodiments, the multifunctional polypeptide molecule as described herein comprises an anti-TCRβV antibody molecule comprises an antigen binding domain comprising: (a) a light chain variable region (VL) comprising: (i) one, two or all of (e.g., three) a light chain complementarity determining region 1 (LC CDR1), a light chain complementarity determining region 2 (LC CDR2), and a light chain complementarity determining region 3 (LC CDR3) of a humanized B-H light chain (LC) of Table 2; and (ii) a framework region (FR) having at least 95% sequence identity with one, two, three or all (e.g., four) of a framework region 1 (FR1), a framework region 2 (FR2), a framework region 3 (FR3), and a framework region 4 (FR4) of a humanized B-H LC of Table 2; and/or (b) a heavy chain variable region (VH) comprising: (i) one, two or all of (e.g., three) a heavy chain complementarity determining region 1 (HC CDR1), a heavy chain complementarity determining region 2 (HC CDR2) and a heavy chain complementarity determining region 3 (HC CDR3) of a humanized B-H heavy chain (HC) of Table 2; and (ii) a framework region (FR) having at least 95% sequence identity with one, two, three or all (e.g., four) of a framework region 1 (FR1), a framework region 2 (FR2), a framework region 3 (FR3), and a framework region 4 (FR4) of a humanized B-H HC of Table 2.

[1332] In some embodiments, the multifunctional polypeptide molecule as described herein comprises an anti-TCRβV antibody molecule comprising an antigen binding domain comprising: (i) a HC CDR1, a HC CDR2 and a HC CDR3 of Antibody B-H listed in Table 2; or (ii) a LC CDR1, a LC CDR2, and a LC CDR3 of Antibody B-H listed in Table 2.

[1333] In some embodiments, the multifunctional polypeptide molecule as described herein comprises an anti-TCRβV antibody molecule comprising an antigen binding domain comprising a heavy chain variable region (VH) comprising one, two or all (e.g., three) of a HC CDR1, a HC CDR2 and a HC CDR3 of a humanized Antibody B-H listed in Table 2.

[1334] In some embodiments, the multifunctional polypeptide molecule as described herein comprises an anti-TCRβV antibody molecule comprising an antigen binding domain comprising a light chain variable region (VL) comprising one, two or all (e.g., three) of a LC CDR1, a LC CDR2 and a LC CDR3 of a humanized Antibody B-H listed in Table 2.

[1335] In some embodiments, the multifunctional polypeptide molecule as described herein comprises an anti-TCRβV antibody molecule comprising: a VH sequence of a humanized Antibody B-H listed in Table 2, or a sequence having at least about 75%, 80%, 85%, 90%, 95%, 99%, 99.5%, 99.7%, 99.9%, or 100% sequence identity to a VH of a humanized Antibody B-H listed in Table 2; and/or a VL sequence of a humanized Antibody B-H listed in Table 2, or a sequence having at least about 75%, 80%, 85%, 90%, 95%, 99%, 99.5%, 99.7%, 99.9%, or 100% sequence identity to a VL of a humanized Antibody B-H listed in Table 2.

[1336] In some embodiments, the multifunctional polypeptide molecule as described herein comprises an anti-TCRβV antibody molecule comprising a framework region (FR) having at least 75%, 80%, 85%, 90%, 95%, 99%, 99.5%, 99.7%, 99.9%, or 100% sequence identity with one of: a FR1, a FR2, a FR3, and a FR4 of a humanized B-H LC of Table 2.

[1337] In some embodiments, the multifunctional polypeptide molecule as described herein comprises an anti-TCRβV antibody molecule comprising a framework region (FR) having at least 75%, 80%, 85%, 90%, 95%, 99%, 99.5%, 99.7%, 99.9%, or 100% sequence identity with any two of: a FR1, a FR2, a FR3, and a FR4 of a humanized B-H LC of Table 2.

[1338] In some embodiments, the multifunctional polypeptide molecule as described herein comprises an anti-TCRβV antibody molecule comprising a framework region (FR) having at least 75%, 80%, 85%, 90%, 95%, 99%, 99.5%, 99.7%, 99.9%, or 100% sequence identity with any three of: a FR1, a FR2, a FR3, and a FR4 of a humanized B-H LC of Table 2.

[1339] In some embodiments, the multifunctional polypeptide molecule as described herein comprises an anti-TCRβV antibody molecule comprises a framework region (FR) having at least 75%, 80%, 85%, 90%, 95%, 99%, 99.5%, 99.7%, 99.9%, or 100% sequence identity with all of: a FR1, a FR2, a FR3, and a FR4 of a humanized B-H LC of Table 2.

[1340] In some embodiments, the multifunctional polypeptide molecule as described herein comprises an anti-TCRβV antibody molecule comprises a framework region (FR) having at least 75%, 80%, 85%, 90%, 95%, 99%, 99.5%, 99.7%, 99.9%, or 100% sequence identity with one of: a FR1, a FR2, a FR3, and a FR4 of a humanized B-H HC of Table 2.

[1341] In some embodiments, the multifunctional polypeptide molecule as described herein comprises an anti-TCRβV antibody molecule comprises a framework region (FR) having at least 75%, 80%, 85%, 90%, 95%, 99%, 99.5%, 99.7%, 99.9%, or 100% sequence identity with any two of: a FR1, a FR2, a FR3, and a FR4 of a humanized B-H HC of Table 2.

[1342] In some embodiments, the multifunctional polypeptide molecule as described herein comprises an anti-TCRβV antibody molecule comprises a framework region (FR) having at least 75%, 80%, 85%, 90%, 95%, 99%, 99.5%, 99.7%, 99.9%, or 100% sequence identity with any three of: a FR1, a FR2, a FR3, and a FR4 of a humanized B-H HC of Table 2.

[1343] In some embodiments, the multifunctional polypeptide molecule as described herein comprises an anti-TCRβV antibody molecule comprises a framework region (FR) having at least 75%, 80%, 85%, 90%, 95%, 99%, 99.5%, 99.7%, 99.9%, or 100% sequence identity with all of: a FR1, a FR2, a FR3, and a FR4 of a humanized B-H HC of Table 2.

[1344] In some embodiments, binding of the multifunctional polypeptide molecule as described herein to a TCRβV region results in a reduction of at least 2, 3, 4, 5, 6, 7, 8, 9, 10, 20, 30, 40, 50, 60, 70, 80, 90, 100, 200, 300, 400, 500, 600, 700, 800, 900, 1000, 1500, 2000, 2500, 3000, 3500, 4000, 4500, 5000, 5500, 6000, 6500, 7000, 7500, 8000, 8500, 9000, 9500, or 10000 fold, or at least 2-10000 fold in the expression level and or activity of IL-1β as measured by an assay of Example 3.

[1345] In some embodiments, binding of the multifunctional polypeptide molecule as described herein to a TCRβV region results in a reduction of at least 2, 3, 4, 5, 6, 7, 8, 9, 10, 20, 30, 40, 50, 60, 70, 80, 90, 100, 200, 300, 400, 500, 600, 700, 800, 900, 1000, 1500, 2000, 2500, 3000, 3500, 4000, 4500, 5000, 5500, 6000, 6500, 7000, 7500, 8000, 8500, 9000, 9500, or 10000 fold, or at least 2-10000 fold in the expression level and or activity of IL-6 as measured by an assay of Example 3.

[1346] In some embodiments, binding of the multifunctional polypeptide molecule as described herein to a TCRβV region results in a reduction of at least 2, 3, 4, 5, 6, 7, 8, 9, 10, 20, 30, 40, 50, 60, 70, 80, 90, 100, 200, 300, 400, 500, 600, 700, 800, 900, 1000, 1500, 2000, 2500, 3000, 3500, 4000, 4500, 5000, 5500, 6000, 6500, 7000, 7500, 8000, 8500, 9000, 9500, or 10000 fold, or at least 2-10000 fold in the expression level and or activity of TNFα as measured by an assay of Example 3.

[1347] In some embodiments, binding of the multifunctional polypeptide molecule as described herein to a TCRβV region results in a reduction of at least 2, 3, 4, 5, 6, 7, 8, 9, 10, 20, 30, 40, 50, 60, 70, 80, 90, 100, 200, 300, 400, 500, 600, 700, 800, 900, 1000, 1500, 2000, 2500, 3000, 3500, 4000, 4500, 5000, 5500, 6000, 6500, 7000, 7500, 8000, 8500, 9000, 9500, or 10000 fold, or at least 2-10000 fold in the expression level and or activity of IL-2 as measured by an assay of Example 3.

[1348] In some embodiments, the multifunctional polypeptide molecule as described herein comprises an anti-TCRβV antibody molecule that binds to a conformational or a linear epitope on the T cell.

[1349] In some embodiments, the multifunctional polypeptide molecule as described herein comprises an anti-TCRβV antibody molecule that is a full antibody (e.g., an antibody that includes at least one, and preferably two, complete heavy chains, and at least one, and preferably two, complete light chains), or an antigen-binding fragment (e.g., a Fab, F(ab′)2, Fv, a single chain Fv fragment, a single domain antibody, a diabody (dAb), a bivalent antibody, or bispecific antibody or fragment thereof, a single domain variant thereof, or a camelid antibody).

[1350] In some embodiments, the multifunctional polypeptide molecule as described herein comprises an anti-TCRβV antibody molecule that comprises one or more heavy chain constant regions chosen from IgG1, IgG2, IgG3, IgGA1, IgGA2, IgG4, IgJ, IgM, IgD, or IgE, or a fragment thereof, e.g., as described in Table 3.

[1351] In some embodiments, the multifunctional polypeptide molecule as described herein comprises an anti-TCRβV antibody molecule that comprises a heavy chain constant region of an IgM or a fragment thereof, optionally wherein the IgM heavy chain constant region comprises the sequence of SEQ ID NO: 73, or a sequence with at least 75%, 80%, 85%, 90%, 95%, 99%, 99.5%, 99.7%, 99.9%, or 100% sequence identity thereto.

[1352] In some embodiments, the multifunctional polypeptide molecule as described herein comprises an anti-TCRβV antibody molecule that comprises a heavy chain constant region of an IgJ or a fragment thereof, optionally wherein the IgJ heavy chain constant region comprises the sequence of SEQ ID NO: 76 or a sequence with at least 75%, 80%, 85%, 90%, 95%, 99%, 99.5%, 99.7%, 99.9%, or 100% sequence identity thereto.

[1353] In some embodiments, the multifunctional polypeptide molecule as described herein comprises an anti-TCRβV antibody molecule that comprises a heavy chain constant region of an IgGA1, or a fragment thereof, optionally wherein the IgGA1 heavy chain constant region comprises the sequence of SEQ ID NO: 74, or a sequence at least 75%, 80%, 85%, 90%, 95%, 99%, 99.5%, 99.7%, 99.9%, or 100% sequence identity thereto.

[1354] In some embodiments, the multifunctional polypeptide molecule as described herein comprises an anti-TCRβV antibody molecule that comprises a heavy chain constant region of an IgGA2, or a fragment thereof, optionally wherein the IgGA2 heavy chain constant region comprises a sequence listed in Table 3, e.g., SEQ ID NO: 75, or a sequence with at least 75%, 80%, 85%, 90%, 95%, 99%, 99.5%, 99.7%, 99.9%, or 100% sequence identity thereto.

[1355] In some embodiments, the multifunctional polypeptide molecule as described herein comprises an anti-TCRβV antibody molecule that comprises a light chain constant region chosen from the light chain constant regions of kappa or lambda, or a fragment thereof, e.g., as described in Table 3.

[1356] In some embodiments, the multifunctional polypeptide molecule as described herein comprises an anti-TCRβV antibody molecule that comprises a light chain constant region of a kappa chain, or a fragment thereof, optionally wherein the kappa chain constant region comprises the sequence of SEQ ID NO: 39, or a sequence with at least 75%, 80%, 85%, 90%, 95%, 99%, 99.5%, 99.7%, 99.9%, or 100% sequence identity thereto.

[1357] In some embodiments, the multifunctional polypeptide molecule as described herein comprises an anti-TCRβV antibody molecule that comprises: (i) one or more heavy chain constant regions comprising a heavy chain constant region chosen from IgG1, IgG2, IgG3, IgGA1, IgGA2, IgG4, IgJ, IgM, IgD, or IgE, or a fragment thereof, e.g., as described in Table 3; and (ii) a light chain constant region comprising a light chain constant region chosen from the light chain constant regions of kappa or lambda, or a fragment thereof, e.g., as described in Table 3.

[1358] In some embodiments, the multifunctional polypeptide molecule as described herein binds to and activates an immune cell, e.g., an effector cell.

[1359] In some embodiments, the multifunctional polypeptide molecule as described herein binds to, but does not activate an immune cell, e.g., an effector cell.

[1360] In some embodiments, the multifunctional polypeptide molecule as described herein further comprises an NK cell engager, a T cell engager other than an anti-TCRβV antibody molecule, a B cell engager, a dendritic cell engager, or a macrophage cell engager, or a combination thereof.

[1361] In some embodiments, the multifunctional polypeptide molecule as described herein further comprises a tumor-targeting moiety that binds to a cancer antigen present on a cancer, e.g., a hematological cancer, a solid tumor, a metastatic cancer, soft tissue tumor, metastatic lesion, or a combination thereof.

[1362] In some embodiments, the cancer antigen is a tumor antigen or stromal antigen, or a hematological antigen.

[1363] In some embodiments, the cancer antigen is selected from: BCMA, CD19, CD20, CD22, FcRH5, PDL1, CD47, gangloside 2 (GD2), prostate stem cell antigen (PSCA), prostate specific membrane antigen (PMSA), prostate-specific antigen (PSA), carcinoembryonic antigen (CEA), Ron Kinase, c-Met, Immature laminin receptor, TAG-72, BING-4, Calcium-activated chloride channel 2, Cyclin-B1, 9D7, Ep-CAM, EphA3, Her2/neu, Telomerase, SAP-1, Survivin, NY-ESO-1/LAGE-1, PRAME, SSX-2, Melan-A/MART-1, Gp100/pmel17, Tyrosinase, TRP-1/-2, MC1R, β-catenin, BRCA1/2, CDK4, CML66, Fibronectin, p53, Ras, TGF-B receptor, AFP, ETA, MAGE, MUC-1, CA-125, BAGE, GAGE, NY-ESO-1, β-catenin, CDK4, CDC27, α actinin-4, TRP1/gp75, TRP2, gp100, Melan-A/MART1, gangliosides, WT1, EphA3, Epidermal growth factor receptor (EGFR), MART-2, MART-1, MUC1, MUC2, MUM1, MUM2, MUM3, NA88-1, NPM, OA1, OGT, RCC, RUI1, RUI2, SAGE, TRG, TRP1, TSTA, Folate receptor alpha, L1-CAM, CAIX, gpA33, GD3, GM2, VEGFR, Intergrins (Integrin alphaVbeta3, Integrin alpha5Beta1), Carbohydrates (Le), IGF1R, EPHA3, TRAILR1, TRAILR2, RANKL, (FAP), TGF-beta, hyaluronic acid, collagen, e.g., collagen IV, tenascin C, and tenascin W.

[1364] In some embodiments, the tumor-targeting moiety is a BCMA targeting moiety or a FcRH5 targeting moiety.

[1365] In some embodiments, the cancer is a solid tumor including but not limited to: pancreatic (e.g., pancreatic adenocarcinoma) cancer, breast cancer, colorectal cancer, lung cancer (e.g., small or non-small cell lung cancer), skin cancer, ovarian cancer, or liver cancer.

[1366] In some embodiments, the cancer is a hematological cancer including, but not limited to: a B-cell or T cell malignancy, e.g., Hodgkin's lymphoma, Non-Hodgkin's lymphoma (e.g., B cell lymphoma, diffuse large B cell lymphoma, follicular lymphoma, chronic lymphocytic leukemia, mantle cell lymphoma, marginal zone B-cell lymphoma, Burkitt lymphoma, lymphoplasmacytic lymphoma, hairy cell leukemia), acute myeloid leukemia (AML), chronic myeloid leukemia, myelodysplastic syndrome, multiple myeloma, and acute lymphocytic leukemia.

[1367] In some embodiments, the cytokine molecule is chosen from interleukin-2 (IL-2), interleukin-7 (IL-7), interleukin-12 (IL-12), interleukin-15 (IL-15), interleukin-18 (IL-18), interleukin-21 (IL-21), or interferon gamma, or a fragment, variant or a combination thereof.

[1368] In some embodiments, the cytokine molecule is a monomer or a dimer.

[1369] In some embodiments, the cytokine molecule further comprises a receptor dimerizing domain, e.g., an IL15Ralpha dimerizing domain.

[1370] In some embodiments, the cytokine molecule (e.g., IL-15) and the receptor dimerizing domain (e.g., an IL15Ralpha dimerizing domain) are not covalently linked, e.g., are non-covalently associated.

[1371] In some embodiments, the multifunctional polypeptide molecule as described herein further comprises an immunoglobulin constant region (e.g., Fc region) chosen from the heavy chain constant regions of IgG1, IgG2, IgG3, IgGA1, IgGA2, IgG4, IgJ, IgM, IgD, or IgE, or a fragment thereof, optionally wherein, the heavy chain constant region comprises the heavy chain constant region of human IgG1, IgG2 or IgG4.

[1372] In some embodiments, the immunoglobulin constant region (e.g., an Fc region) is linked, e.g., covalently linked to, one or more of tumor-targeting moiety, the cytokine molecule, or the stromal modifying moiety.

[1373] In some embodiments, an interface of a first and second immunoglobulin chain constant regions (e.g., Fc region) is altered, e.g., mutated, to increase or decrease dimerization, e.g., relative to a non-engineered interface.

[1374] In some embodiments, the dimerization of the immunoglobulin chain constant region (e.g., Fc region) is enhanced by providing an Fe interface of a first and a second Fc region with one or more of: a paired cavity-protuberance (“knob-in-a hole”), an electrostatic interaction, or a strand-exchange, such that a greater ratio of heteromultimer:homomultimer forms, e.g., relative to a non-engineered interface.

[1375] In some embodiments, the multifunctional polypeptide molecule as described herein further comprises a linker, e.g., a linker described herein, optionally wherein the linker is selected from: a cleavable linker, a non-cleavable linker, a peptide linker, a flexible linker, a rigid linker, a helical linker, or a non-helical linker.

[1376] In some embodiments, provided herein is an isolated nucleic acid molecule comprising a nucleotide sequence encoding the multifunctional polypeptide molecule as described herein, or a nucleotide sequence having at least 75%, 80%, 85%, 90%, 95%, 99%, 99.5%, 99.7%, 99.9%, or 100% sequence identity thereto.

[1377] In some embodiments, provided herein is a vector, e.g., an expression vector, comprising one or more of the nucleic acid molecules as described herein.

[1378] In some embodiments, provided herein is a cell, e.g., host cell, comprising the nucleic acid molecule as described herein or the vector of as described herein.

[1379] In some embodiments, provided herein is a method of making, e.g., producing or manufacturing, the multifunctional polypeptide molecule as described herein, comprising culturing the host cell as described herein, under suitable conditions, e.g., conditions suitable expression of the multifunctional polypeptide molecule as described herein.

[1380] In some embodiments, provided herein is a pharmaceutical composition comprising the multifunctional polypeptide molecule as described herein, and a pharmaceutically acceptable carrier, excipient, or diluent.

[1381] In some embodiments, provided herein is a method of modulating, e.g., enhancing, an immune response in a subject comprising administering to the subject an effective amount of the multifunctional polypeptide molecule as described herein. In some embodiments, the method comprises expanding, e.g., increasing the number of, an immune cell population in the subject.

[1382] In some embodiments, provided herein is a method of expanding, e.g., increasing the number of, an immune cell population comprising, contacting the immune cell population with an effective amount of the multifunctional polypeptide molecule as described herein. In some embodiments, the expansion occurs in vivo or ex vivo (e.g., in vitro).

[1383] In some embodiments, the immune cell population comprises a TCRβV expressing cell, e.g., a TCRβV+ cell.

[1384] In some embodiments, the TCRβV expressing cell is a T cell, e.g., a CD8+ T cell, a CD3+ T cell or a CD4+ T cell.

[1385] In some embodiments, the immune cell population comprises a T cell (e.g., a CD4 T cell, a CD8 T cell (e.g., an effector T cell, a T cell having a memory-like phenotype or a memory T cell (e.g., a memory effector T cell (e.g., TEM cell, e.g., TEMRA cell), or a tumor infiltrating lymphocyte (TIL).

[1386] In some embodiments, the immune cell population comprises a T cell, a Natural Killer cell, a B cell, or a myeloid cell.

[1387] In some embodiments, the immune cell population is obtained from a healthy subject.

[1388] In some embodiments, the immune cell population is obtained from a subject (e.g., from an apheresis sample from the subject) having a disease, e.g., a cancer, e.g., as described herein, optionally wherein the immune cell population comprises a tumor infiltrating lymphocyte (TIL).

[1389] In some embodiments, the method results in an expansion of at least 1.1-10 fold (e.g., at least 1.1, 1.2, 1.3, 1.4, 1.5, 2, 3, 4, 5, 6, 7, 8, 9, or 10 fold expansion).

[1390] In some embodiments, the method further comprises contacting the population of cells with an agent that promotes, e.g., increases, immune cell expansion.

[1391] In some embodiments, the method further comprises contacting the population of cells with an immune checkpoint inhibitor, e.g., a PD-1 inhibitor.

[1392] In some embodiments, the method further comprises contacting the population of cells with a 4-1BB (CD127) agonist, e.g., an anti-4-1BB antibody.

[1393] In some embodiments, the method further comprises comprising contacting the population of cells with a non-dividing population of cells, e.g., feeder cells, e.g., irradiated allogenic human PBMCs.

[1394] In some embodiments, the population of cells is expanded in an appropriate media (e.g., media described herein) that includes one or more cytokines, e.g., IL-2, IL-7, IL-15, or a combination thereof.

[1395] In some embodiments, the population of cells is expanded for a period of at least about 4 hours, 6 hours, 10 hours, 12 hours, 15 hours, 18 hours, 20 hours, or 22 hours, or for at least 1, 2, 3, 4, 5, 6, 7, 8, 9, 10, 11, 12, 13, 14, 15, 1, 6 17, 18, 19, 20 or 21 days, or for at least about 1 week, 2 weeks, 3 weeks, 4 weeks, 5 weeks, 6 weeks, 7 weeks or 8 weeks.

[1396] In some embodiments, expansion of the population of immune cells, is compared to expansion of a similar population of cells with an antibody that binds to: a CD3 molecule, e.g., CD3 epsilon (CD3e) molecule; or a TCR alpha (TCRα) molecule. In some embodiments, expansion of the population of immune cells, is compared to expansion of a similar population of cells not contacted with the anti-TCRβV antibody molecule, or multispecific molecule comprising the anti-TCRβV antibody molecule.

[1397] In some embodiments, expansion of the population of T cells having a memory-like phenotype, e.g., CD45RA+ CCR7− cells (e.g., memory effector T cells, e.g., TEM cells, e.g., TEMRA cells), is compared to expansion of a similar population of cells with an antibody that binds to: a CD3 molecule, e.g., CD3 epsilon (CD3e) molecule; or a TCR alpha (TCRα) molecule.

[1398] In some embodiments, the population of expanded T cells having a memory-like phenotype, e.g., effector memory cells, comprises cells which: (i) have a detectable level of CD45RA, e.g., express or re-express CD45RA; (ii) have low or no expression of CCR7; and/or (iii) have a detectable level of CD95, e.g., express CD95, e.g., a population of CD45RA+, CCR7−, CD95+ T cells, optionally wherein the T cells comprise CD3+, CD4+ or CD8+ T cells.

[1399] In some embodiments, the method results in expansion of, e.g., selective or preferential expansion of, T cells expressing a T cell receptor (TCR) comprising a TCR alpha and/or TCR beta molecule, e.g., TCR alpha-beta T cells (αβ T cells).

[1400] In some embodiments, the method results in expansion of αβT cells over expansion of T cells expressing a TCR comprising a TCR gamma and/or TCR delta molecule, e.g., TCR gamma-delta T cells (γδ T cells).

[1401] In some embodiments, provided herein is a method of treating a disease, e.g., cancer, in a subject comprising administering to the subject an effective amount of the multifunctional polypeptide molecule as described herein.

[1402] In some embodiments, provided herein is a composition comprising the multifunctional polypeptide molecule as described herein for use in treating a disease, e.g., cancer, in a subject.

[1403] In some embodiments, provided herein is a composition comprising the multifunctional polypeptide molecule as described herein for use in the manufacture of a medicament for treating a disease, e.g., cancer, in a subject.

[1404] In some embodiments, provided herein is a method of treating a disease, e.g., cancer, in a subject comprising administering to the subject an effective amount of comprising the multifunctional polypeptide molecule as described herein, thereby treating the cancer.

[1405] In some embodiments, provided herein is a method of treating, e.g., preventing or reducing, cytokine release syndrome (CRS) and/or neurotoxicity (NT) in a subject, e.g., CRS and/or NT associated with a treatment, e.g., a previously administered treatment, comprising administering to the subject an effective amount of the multifunctional polypeptide molecule as described herein, thereby preventing CRS and/or NT in the subject.

[1406] In some embodiments, provided herein is a method of treating, e.g., preventing or reducing, cytokine release syndrome (CRS) and/or neurotoxicity (NT) in a subject, e.g., CRS and/or NT associated with a treatment, e.g., a previously administered treatment, comprising administering to the subject an effective of the multifunctional polypeptide molecule as described herein, thereby preventing CRS and/or NT in the subject.

[1407] In some embodiments, provided herein is a method of targeting a therapy, e.g., treatment, to a T cell in a subject having a disease, e.g., cancer, comprising administering an effective amount of: (i) the multifunctional polypeptide molecule as described herein; and (ii) the therapy, e.g., a tumor targeting therapy (e.g., an antibody that binds to a cancer antigen), e.g., as described herein, thereby targeting the therapy to the T cell in the subject.

[1408] In some embodiments, the method results in: reduced cytokine release syndrome (CRS) (e.g., lesser duration of CRS or no CRS), or a reduced severity of CRS (e.g., absence of severe CRS, e.g., CRS grade 4 or 5) compared to administration of (ii) alone.

[1409] In some embodiments, the multifunctional polypeptide molecule as described herein is administered concurrently with or after the administration of the treatment associated with CRS.

[1410] In some embodiments, provided herein is a method of treating a subject having a cancer, the method comprising: acquiring a value of the status of a TCRβV subfamily for the subject, wherein said value comprises a measure of the presence of, e.g., level or activity of, a TCRβV molecule in a sample from the subject, and administering an effective amount of the multifunctional polypeptide molecule as described herein; to the subject, thereby treating the subject.

[1411] In some embodiments, provided herein is a method of treating a subject having a cancer, the method comprising administering an effective amount of the multifunctional polypeptide molecule as described herein to the subject, wherein the subject has a higher, e.g., increased, level or activity of one or more TCRβV subfamilies, e.g., as described herein, compared to a reference level or activity of one or more TCRβV subfamilies, e.g., in a healthy subject, e.g., a subject not having a cancer.

[1412] In some embodiments, provided herein is a method of expanding a population of immune effector cells from a subject having a cancer, the method comprising: (i) isolating a biological sample comprising a population of immune effector cells from the subject; e.g., a peripheral blood sample, biopsy sample, or bone marrow sample; (ii) acquiring a value of the status of one or more TCRβV subfamilies for the subject, e.g., in the biological sample from the subject, wherein said value comprises a measure of the presence of, e.g., level or activity of, a TCRβV subfamily in a sample from the subject compared to a reference value, e.g., a sample from a health subject, wherein a value that is higher, e.g., increased, in the subject relative to the reference, e.g., healthy subject, is indicative of the presence of cancer in the subject, and (iii) contacting the biological sample comprising a population of immune effector cells with the multifunctional polypeptide molecule as described herein.

[1413] In some embodiments, the method further comprises administering the population of immune effector cells contacted with the multifunctional polypeptide molecule as described herein to the subject.

[1414] In some embodiments, the method further comprises measuring T cell function (e.g., cytotoxic activity, cytokine secretion, or degranulation) in the population of immune effector cells, e.g., compared to a reference population, e.g., an otherwise similar population not contacted with the multifunctional polypeptide molecule as described herein or a population of immune effector cells obtained from a healthy subject (e.g., a subject that does not have a cancer).

[1415] In some embodiments, the biological sample comprising the population of immune effector cells is contacted with the multifunctional polypeptide molecule as described herein identified as being higher, e.g., increased, in the biological sample.

[1416] In some embodiments, the biological sample comprising the population of immune effector cells is contacted with the multifunctional polypeptide molecule as described herein identified as being higher, e.g., increased, in the biological sample.

[1417] In some embodiments, he cancer is a solid tumor including but not limited to: melanoma, pancreatic (e.g., pancreatic adenocarcinoma) cancer, breast cancer, colorectal cancer (CRC), lung cancer (e.g., small or non-small cell lung cancer), skin cancer, ovarian cancer, or liver cancer.

[1418] In some embodiments, the cancer is a hematological cancer including, but not limited to: a B-cell or T cell malignancy, e.g., Hodgkin's lymphoma, Non-Hodgkin's lymphoma (e.g., B cell lymphoma, diffuse large B cell lymphoma (DLBCL), follicular lymphoma, chronic lymphocytic leukemia (B-CLL), mantle cell lymphoma, marginal zone B-cell lymphoma, Burkitt lymphoma, lymphoplasmacytic lymphoma, hairy cell leukemia), acute myeloid leukemia (AML), chronic myeloid leukemia, myelodysplastic syndrome, multiple myeloma, and acute lymphocytic leukemia.

[1419] In some embodiments, the cancer is B-CLL and the TCRβV molecule comprises: (i) TCRβ V6 subfamily comprising, e.g., TCRβ V6-4*01, TCRβ V6-4*02, TCRβ V6-9*01, TCRβ V6-8*01, TCRβ V6-5*01, TCRβ V6-6*02, TCRβ V6-6*01, TCRβ V6-2*01, TCRβ V6-3*01 or TCRβ V6-1*01; (ii) TCRβ V5 subfamily comprising TCRβ V5-6*01, TCRβ V5-4*01, or TCRβ V5-8*01; (iii) TCRβ V3 subfamily comprising TCRβ V3-1*01; (iv) TCRβ V2 subfamily comprising TCRβ V2*01; or (v) TCRβ V19 subfamily comprising TCRβ V19*01, or TCRβ V19*02.

[1420] In some embodiments, the cancer is melanoma and the TCRβV molecule comprises the TCRβ V6 subfamily comprising, e.g., TCRβ V6-4*01, TCRβ V6-4*02, TCRβ V6-9*01, TCRβ V6-8*01, TCRβ V6-5*01, TCRβ V6-6*02, TCRβ V6-6*01, TCRβ V6-2*01, TCRβ V6-3*01 or TCRβ V6-1*01.

[1421] In some embodiments, the cancer is DLBCL and the TCRβV molecule comprises: (i) TCRβ V13 subfamily comprising TCRβ V13*01; (ii) TCRβ V3 subfamily comprising TCRβ V3-1*01; or (iii) TCRβ V23 subfamily.

[1422] In some embodiments, the cancer is CRC and the TCRβV molecule comprises: (i) TCRβ V19 subfamily comprising TCRβ V19*01, or TCRβ V19*02 (ii) TCRβ V12 subfamily comprising TCRβ V12-4*01, TCRβ V12-3*01, or TCRβ V12-5*01 (iii) TCRβ V16 subfamily comprising TCRβ V16*01; or (iv) TCRβ V21 subfamily.

[1423] In some embodiments, the tumor comprises an antigen, e.g., a tumor antigen, e.g., a tumor associated antigen or a neoantigen; and/or the one or more TCRβV subfamilies recognize, e.g., bind to, the tumor antigen.

[1424] In some embodiments, the sample comprises a blood sample, e.g., a peripheral blood sample, a biopsy, e.g., a tumor biopsy, or a bone marrow sample.

[1425] In some embodiments, the sample comprises a biological sample comprising immune cells, e.g., TCRBV expressing cells (e.g., TCRBV+ cells), T cells, or NK cells.

[1426] In some embodiments, the T cells comprise a CD4 T cell, a CD8 T cell, (e.g., an effector T cell or a memory T cell (e.g., a memory effector T cell (e.g., TEM cell, e.g., TEMRA cell), or a tumor infiltrating lymphocyte (TIL).

[1427] In some embodiments, the method results in an expansion, e.g., in vivo or ex vivo expansion, of at least 1.1-1000 fold, e.g., 1.1-10, 10-100, 100-200, 200-300, 300-400, 400-500, 500-600, 600-700, 700-800, 800-900, or 900-1000 fold expansion of an immune effector cell population comprising a TCRVB expressing immune effector cell, e.g., T cell.

[1428] In some embodiments, the population of cells is expanded in an appropriate media (e.g., media described herein) that includes one or more cytokines, e.g., IL-2, IL-7, IL-15, or a combination thereof.

[1429] In some embodiments, the population of cells is expanded for a period of at least about 4 hours, 6 hours, 10 hours, 12 hours, 15 hours, 18 hours, 20 hours, or 22 hours, or for at least 1, 2, 3, 4, 5, 6, 7, 8, 9, 10, 11, 12, 13, 14, 15, 1, 6 17, 18, 19, 20 or 21 days, or for at least about 1 week, 2 weeks, 3 weeks, 4 weeks, 5 weeks, 6 weeks, 7 weeks or 8 weeks.

[1430] In some embodiments, expansion of the population of immune cells, is compared to expansion of a similar population of cells with an antibody that binds to: a CD3 molecule, e.g., CD3 epsilon (CD3e) molecule; or a TCR alpha (TCRα) molecule.

[1431] In some embodiments, expansion of the population of immune cells, is compared to expansion of a similar population of cells not contacted with the anti-TCRβV antibody molecule.

[1432] In some embodiments, expansion of the population of T cells having a memory-like phenotype, e.g., memory effector T cells, e.g., TEM cells, e.g., TEMRA cells, is compared to expansion of a similar population of cells with an antibody that binds to: a CD3 molecule, e.g., CD3 epsilon (CD3e) molecule; or a TCR alpha (TCRα) molecule.

[1433] In some embodiments, the population of expanded T cells having a memory-like phenotype, e.g., effector memory cells, comprises cells which: (i) have a detectable level of CD45RA, e.g., express or re-express CD45RA; (ii) have low or no expression of CCR7; and/or (iii) have a detectable level of CD95, e.g., express CD95, e.g., a population of CD45RA+, CCR7−, CD95+ T cells, optionally wherein the T cells comprise CD3+, CD4+ or CD8+ T cells.

[1434] In some embodiments, the method results in expansion of, e.g., selective or preferential expansion of, T cells expressing a T cell receptor (TCR) comprising a TCR alpha and/or TCR beta molecule, e.g., TCR alpha-beta T cells (αβ T cells).

[1435] In some embodiments, the method results in expansion of αβT cells over expansion of T cells expressing a TCR comprising a TCR gamma and/or TCR delta molecule, e.g., TCR gamma-delta T cells (γδ T cells).

[1436] In some embodiments, the TCRβV binding moiety or molecule comprises an antigen binding domain comprising a light chain variable region (VL) comprising one, two or all of a LC CDR1, a LC CDR2 and a LC CDR3 of a VL disclosed in Tables 1, 2, 10, 11, 12 or 13.

[1437] In some embodiments, the TCRβV binding moiety or molecule comprises an antigen binding domain comprising a heavy chain variable region (VH) comprising one, two or all of a HC CDR1, a HC CDR2 and a HC CDR3 of a VH disclosed in Tables 1, 2, 10, 11, 12 or 13.

[1438] In some embodiments, the TCRβV binding moiety or molecule comprises a light chain comprising a framework region, e.g., framework region 1 (FR1), comprising one, two or all (e.g., three) of: (i) an Aspartic Acid at position 1, e.g., a substitution at position 1 according to Kabat numbering, e.g., a Alanine to Aspartic Acid substitution; or (ii) an Asparagine at position 2, e.g., a substitution at position 2 according to Kabat numbering, e.g., a Isoleucine to Asparagine, a Serine to Asparagine, or a Tyrosine to Asparagine substitution; or (iii) a Leucine at position 4, e.g., a substitution at position 4 according to Kabat numbering, e.g., a Methionine to Leucine substitution, wherein the substitution is relative to a human germline light chain framework region sequence.

[1439] In some embodiments, the TCRβV binding moiety or molecule comprises a light chain comprising a framework region, e.g., framework region 3 (FR3), comprising one, two or all (e.g., three) of: (i) a Glycine at position 66, e.g., a substitution at position 66 according to Kabat numbering, e.g., a Lysine to Glycine, or a Serine to Glycine substitution; or (ii) an Asparagine at position 69, e.g., a substitution at position 69 according to Kabat numbering, e.g., a Threonine to Asparagine substitution; or (iii) a Tyrosine at position 71, e.g., a substitution at position 71 according to Kabat numbering, e.g., a Phenylalanine to Tyrosine, or Alanine to Tyrosine substitution, wherein the substitution is relative to a human germline light chain framework region sequence.

[1440] In some embodiments, the TCRβV binding moiety or molecule binds to an outward facing region (e.g., epitope) on a TCRβV protein, e.g., as depicted by the circled area in FIG. 24A. In some embodiments, the outward facing region on the TCRβV protein comprises a structurally conserved region of TCRβV, e.g., a region of TCRβV having a similar structure across one or more TCRβV subfamilies.

[1441] In some embodiments, the method further comprises administering (e.g., sequentially, simultaneously or concurrently) a second agent, e.g., therapeutic agent, e.g., as described herein.

[1442] In some embodiments, the second agent, e.g., therapeutic agent, comprises a chemotherapeutic agent, a biologic agent, hormonal therapy), radiation, or surgery.

[1443] In some embodiments, the disease is a cancer, e.g., a solid tumor or a hematological cancer, or a metastatic lesion.

[1444] In some embodiments, the cancer antigen is BCMA or FcRH5.

The application's sequence listing, which the Patent Office published only in electronic form, follows.

SEQUENCE LISTING (3790 sequences)

SEQ ID NO: 1 - protein, 119 aa, Artificial Sequence
  Description of Artificial Sequence: Synthetic polypeptide
QVQLQQSGPELVKPGTSVKISCKASGYSFTTYYIHWVKQRPGQGLEWIGWFFPGSGNIKYNEKFKGKATLTADTSSSTAYMQLSSLTSEESAVYFCAGSYYSYDVLDYWGHGTTLTVSS

SEQ ID NO: 2 - protein, 107 aa, Artificial Sequence
  Description of Artificial Sequence: Synthetic polypeptide
DILMTQSQKFMSTSLGDRVSVSCKASQNVGINVVWHQQKPGQSPKALIYSSSHRYSGVPDRFTGSGSGTDFTLTINNVQSEDLAEYFCQQFKSYPLTFGAGTKLELK

SEQ ID NO: 3 - protein, 10 aa, Artificial Sequence
  Description of Artificial Sequence: Synthetic peptide
GYSFTTYYIH

SEQ ID NO: 4 - protein, 17 aa, Artificial Sequence
  Description of Artificial Sequence: Synthetic peptide
WFFPGSGNIKYNEKFKG

SEQ ID NO: 5 - protein, 10 aa, Artificial Sequence
  Description of Artificial Sequence: Synthetic peptide
SYYSYDVLDY

SEQ ID NO: 6 - protein, 11 aa, Artificial Sequence
  Description of Artificial Sequence: Synthetic peptide
KASQNVGINVV

SEQ ID NO: 7 - protein, 7 aa, Artificial Sequence
  Description of Artificial Sequence: Synthetic peptide
SSSHRYS

SEQ ID NO: 8 - protein, 9 aa, Artificial Sequence
  Description of Artificial Sequence: Synthetic peptide
QQFKSYPLT

SEQ ID NO: 9 - protein, 119 aa, Artificial Sequence
  Description of Artificial Sequence: Synthetic polypeptide
QVQLVQSGAEVKKPGSSVKVSCKASGYSFTTYYIHWVRQAPGQGLEWMGWFFPGSGNIKYNEKFKGRVTITADTSTSTAYMELSSLRSEDTAVYYCAGSYYSYDVLDYWGQGTTVTVSS

SEQ ID NO: 10 - protein, 107 aa, Artificial Sequence
  Description of Artificial Sequence: Synthetic polypeptide
DIQMTQSPSFLSASVGDRVTITCKASQNVGINVVWHQQKPGKAPKALIYSSSHRYSGVPSRFSGSGSGTEFTLTISSLQPEDFATYFCQQFKSYPLTFGQGTKLEIK

SEQ ID NO: 11 - protein, 107 aa, Artificial Sequence
  Description of Artificial Sequence: Synthetic polypeptide
DIQMTQSPSSLSASVGDRVTITCKASQNVGINVVWHQQKPGKVPKALIYSSSHRYSGVPSRFSGSGSGTDFTLTISSLQPEDVATYFCQQFKSYPLTFGQGTKLEIK

SEQ ID NO: 12 - DNA, 357 bp, Artificial Sequence
  Description of Artificial Sequence: Synthetic polynucleotide
caggtgcagctggttcagtctggcgccgaagtgaagaaacctggctcctccgtgaaggtgtcctgcaaggcttccggctactccttcaccacctactacatccactgggtccgacaggcccctggacaaggattggaatggatgggctggttcttccccggctccggcaacatcaagtacaacgagaagttcaagggccgcgtgaccatcaccgccgacacctctacctctaccgcctacatggaactgtccagcctgagatctgaggacaccgccgtgtactactgcgccggctcctactactcttacgacgtgctggattactggggccagggcaccacagtgacagtgtcctct

SEQ ID NO: 13 - DNA, 321 bp, Artificial Sequence
  Description of Artificial Sequence: Synthetic polynucleotide
gacatccagatgacccagtctccatccttcctgtccgcctctgtgggcgacagagtgaccatcacatgcaaggcctctcagaacgtgggcatcaacgtcgtgtggcaccagcagaagcctggcaaggctcctaaggctctgatctactcctccagccaccggtactctggcgtgccctctagattttccggctctggctctggcaccgagtttaccctgacaatctccagcctgcagcctgaggacttcgccacctacttttgccagcagttcaagagctaccctctgacctttggccagggcaccaagctggaaatcaag

SEQ ID NO: 14 - DNA, 321 bp, Artificial Sequence
  Description of Artificial Sequence: Synthetic polynucleotide
gacatccagatgacccagtctccatcctctctgtccgcctctgtgggcgacagagtgaccatcacatgcaaggcctctcagaacgtgggcatcaacgtcgtgtggcaccagcagaaacctggcaaggtgcccaaggctctgatctactcctccagccacagatactccggcgtgccctctagattctccggctctggctctggcaccgactttaccctgacaatctccagcctgcagcctgaggacgtggccacctacttttgccagcagttcaagagctaccctctgacctttggccagggcaccaagctggaaatcaag

SEQ ID NO: 15 - protein, 117 aa, Artificial Sequence
  Description of Artificial Sequence: Synthetic polypeptide
DVQLVESGGGLVQPGGSRKLSCAASGFTFSNFGMHWVRQAPDKGLEWVAYISSGSSTIYYADTLKGRFTISRDNPKNTLFLQMTSLRSEDTAMYYCARRGEGAMDYWGQGTSVTVSS

SEQ ID NO: 16 - protein, 106 aa, Artificial Sequence
  Description of Artificial Sequence: Synthetic polypeptide
ENVLTQSPAIMSASLGEKVTMSCRASSSVNYIYWYQQKSDASPKLWIYYTSNLAPGVPTRFSGSGSGNSYSLTISSMEGEDAATYYCQQFTSSPFTFGSGTKLEIK

SEQ ID NO: 17 - protein, 10 aa, Artificial Sequence
  Description of Artificial Sequence: Synthetic peptide
GFTFSNFGMH

SEQ ID NO: 18 - protein, 17 aa, Artificial Sequence
  Description of Artificial Sequence: Synthetic peptide
YISSGSSTIYYADTLKG

SEQ ID NO: 19 - protein, 8 aa, Artificial Sequence
  Description of Artificial Sequence: Synthetic peptide
RGEGAMDY

SEQ ID NO: 20 - protein, 10 aa, Artificial Sequence
  Description of Artificial Sequence: Synthetic peptide
RASSSVNYIY

SEQ ID NO: 21 - protein, 7 aa, Artificial Sequence
  Description of Artificial Sequence: Synthetic peptide
YTSNLAP

SEQ ID NO: 22 - protein, 9 aa, Artificial Sequence
  Description of Artificial Sequence: Synthetic peptide
QQFTSSPFT

SEQ ID NO: 23 - protein, 117 aa, Artificial Sequence
  Description of Artificial Sequence: Synthetic polypeptide
QVQLVESGGGVVQPGRSLRLSCAASGFTFSNFGMHWVRQAPGKGLEWVAYISSGSSTIYYADTLKGRFTISRDNSKNTLYLQMNSLRAEDTAVYYCARRGEGAMDYWGQGTTVTVSS

SEQ ID NO: 24 - protein, 117 aa, Artificial Sequence
  Description of Artificial Sequence: Synthetic polypeptide
EVQLVESGGGLVQPGGSLRLSCAASGFTFSNFGMHWVRQAPGKGLEWVSYISSGSSTIYYADTLKGRFTISRDNAKNSLYLQMNSLRAEDTAVYYCARRGEGAMDYWGQGTTVTVSS

SEQ ID NO: 25 - protein, 117 aa, Artificial Sequence
  Description of Artificial Sequence: Synthetic polypeptide
EVQLVESGGGLVQPGGSLRLSCAASGFTFSNFGMHWVRQAPGKGLEWVSYISSGSSTIYYADTLKGRFTISRDNSKNTLYLQMNSLRAEDTAVYYCARRGEGAMDYWGQGTTVTVSS

SEQ ID NO: 26 - protein, 106 aa, Artificial Sequence
  Description of Artificial Sequence: Synthetic polypeptide
DNQLTQSPSFLSASVGDRVTITCRASSSVNYIYWYQQKPGKAPKLLIYYTSNLAPGVPSRFSGSGSGNEYTLTISSLQPEDFATYYCQQFTSSPFTFGQGTKLEIK

SEQ ID NO: 27 - protein, 106 aa, Artificial Sequence
  Description of Artificial Sequence: Synthetic polypeptide
DNQLTQSPSSLSASVGDRVTITCRASSSVNYIYWYQQKPGKAPKLLIYYTSNLAPGVPSRFSGSGSGNDYTLTISSLQPEDFATYYCQQFTSSPFTFGQGTKLEIK

SEQ ID NO: 28 - protein, 106 aa, Artificial Sequence
  Description of Artificial Sequence: Synthetic polypeptide
ENVLTQSPATLSVSPGERATLSCRASSSVNYIYWYQQKPGQAPRLLIYYTSNLAPGIPARFSGSGSGNEYTLTISSLQSEDFAVYYCQQFTSSPFTFGQGTKLEIK

SEQ ID NO: 29 - protein, 105 aa, Artificial Sequence
  Description of Artificial Sequence: Synthetic polypeptide
QNVLTQPPSASGTPGQRVTISCRASSSVNYIYWYQQLPGTAPKLLIYYTSNLAPGVPDRFSGSGSGNSYSLAISGLRSEDEADYYCQQFTSSPFTFGTGTKVTVL

SEQ ID NO: 30 - protein, 105 aa, Artificial Sequence
  Description of Artificial Sequence: Synthetic polypeptide
SNELTQPPSVSVSPGQTARITCRASSSVNYIYWYQQKSGQAPVLVIYYTSNLAPGIPERFSGSGSGNMYTLTISGAQVEDEADYYCQQFTSSPFTFGTGTKVTVL

SEQ ID NO: 31 - DNA, 351 bp, Artificial Sequence
  Description of Artificial Sequence: Synthetic polynucleotide
gaggtgcagctggttgaatctggcggaggattggttcagcctggcggctctctgagactgtcttgtgccgcttctggcttcaccttctccaacttcggcatgcactgggtccgacaggcccctggaaaaggactggaatgggtgtcctacatctcctccggctcctccaccatctactacgctgacaccctgaagggcagattcaccatctctcgggacaacgccaagaactccctgtacctgcagatgaacagcctgagagccgaggacaccgccgtgtactactgtgctagaagaggcgagggcgccatggattattggggccagggaaccacagtgaccgtgtctagc

SEQ ID NO: 32 - DNA, 351 bp, Artificial Sequence
  Description of Artificial Sequence: Synthetic polynucleotide
gaggtgcagctggttgaatctggcggaggattggttcagcctggcggctctctgagactgtcttgtgccgcttctggcttcaccttctccaacttcggcatgcactgggtccgacaggcccctggaaaaggactggaatgggtgtcctacatctcctccggctcctccaccatctactacgctgacaccctgaagggcagattcaccatcagccgggacaactccaagaacaccctgtacctgcagatgaactccctgagagccgaggacaccgccgtgtactactgtgctagaagaggcgagggcgccatggattattggggccagggaaccacagtgaccgtgtctagc

SEQ ID NO: 33 - DNA, 351 bp, Artificial Sequence
  Description of Artificial Sequence: Synthetic polynucleotide
caggtgcagctggtggaatctggtggcggagttgtgcagcctggcagatccctgagactgtcttgtgccgcctctggcttcaccttctccaacttcggcatgcactgggtccgacaggcccctggaaaaggattggagtgggtcgcctacatctcctccggctcctccaccatctactacgctgacaccctgaagggcagattcaccatcagccgggacaactccaagaacaccctgtacctgcagatgaactccctgagagccgaggacaccgccgtgtactactgtgctagaagaggcgagggcgccatggattattggggccagggaaccacagtgaccgtgtctagc

SEQ ID NO: 34 - DNA, 318 bp, Artificial Sequence
  Description of Artificial Sequence: Synthetic polynucleotide
gataaccagctgacccagtctcctagcttcctgtctgcctctgtgggcgacagagtgacaattacctgccgggcctcctcctccgtgaactacatctactggtatcagcagaagcccggcaaggcccctaagctgctgatctactacacctccaatctggcccctggcgtgccctctagattttccggatctggctccggcaacgagtataccctgacaatctccagcctgcagcctgaggacttcgccacctactactgccagcagttcacctcctctccattcacctttggccagggcaccaagctggaaatcaaa

SEQ ID NO: 35 - DNA, 317 bp, Artificial Sequence
  Description of Artificial Sequence: Synthetic polynucleotide
ataaccagctgacccagtctccttccagcctgtctgcttctgtgggcgacagagtgacaattacctgccgggcctcctcctccgtgaactacatctactggtatcagcagaagcccggcaaggcccctaagctgctgatctactacacctccaatctggcccctggcgtgccctctagattttccggatctggctccggcaacgactataccctgacaatctccagcctgcagcctgaggacttcgccacctactactgccagcagttcacctcctctccattcacctttggccagggcaccaagctggaaatcaaa

SEQ ID NO: 36 - DNA, 318 bp, Artificial Sequence
  Description of Artificial Sequence: Synthetic polynucleotide
gagaatgtgctgacccagtctcctgccacactgtctgttagccctggcgagagagctaccctgagctgcagagcctcttcctccgtgaactacatctactggtatcagcagaagcccggccaggctcctagactgctgatctactacacctccaatctggcccctggcatccctgccagattttccggatctggctccggcaacgagtataccctgaccatctccagcctgcagtccgaggactttgctgtgtactattgccagcagttcacaagcagccctttcacctttggccagggcaccaagctggaaatcaaa

SEQ ID NO: 37 - DNA, 315 bp, Artificial Sequence
  Description of Artificial Sequence: Synthetic polynucleotide
cagaatgtgctgacccaacctccttccgcctctggcacacctggacagagagtgacaatctcctgccgggcctcctcctccgtgaactacatctactggtatcagcagctgcccggcaccgctcctaaactgctgatctactacacctccaatctggcccctggcgtgcccgatagattttccggatctggctccggcaactcctacagcctggctatctctggcctgagatctgaggacgaggccgactactactgccagcagttcacctcctctccattcacctttggcaccggcaccaaagtgacagttctt

SEQ ID NO: 38 - DNA, 315 bp, Artificial Sequence
  Description of Artificial Sequence: Synthetic polynucleotide
tctaatgagctgacccagcctccttccgtgtccgtgtctcctggacagaccgccagaattacctgccgggcctcctcctccgtgaactacatctactggtatcagcagaagtccggccaggctcctgtgctcgtgatctactacacctccaatctggcccctggcatccctgagagattctccggatctggctccggcaacatgtacaccctgaccatctctggcgcccaggtggaagatgaggccgactactactgccagcagttcacctcctctccattcacctttggcaccggcaccaaagtgacagttctt

SEQ ID NO: 39 - protein, 107 aa, Artificial Sequence [sequence omitted]

SEQ ID NO: 40 - protein, 326 aa, Artificial Sequence
  Description of Artificial Sequence: Synthetic polypeptide
ASTKGPSVFPLAPCSRSTSESTAALGCLVKDYFPEPVTVSWNSGALTSGVHTFPAVLQSSGLYSLSSVVTVPSSSLGTKTYTCNVDHKPSNTKVDKRVESKYGPPCPPCPAPEFLGGPSVFLFPPKPKDTLMISRTPEVTCVVVDVSQEDPEVQFNWYVDGVEVHNAKTKPREEQFNSTYRVVSVLTVLHQDWLNGKEYKCKVSNKGLPSSIEKTISKAKGQPREPQVYTLPPSQEEMTKNQVSLTCLVKGFYPSDIAVEWESNGQPENNYKTTPPVLDSDGSFFLYSRLTVDKSRWQEGNVFSCSVMHEALHNHYTQKSLSLSLG

SEQ ID NO: 41 - protein, 330 aa, Homo sapiens
ASTKGPSVFPLAPSSKSTSGGTAALGCLVKDYFPEPVTVSWNSGALTSGVHTFPAVLQSSGLYSLSSVVTVPSSSLGTQTYICNVNHKPSNTKVDKRVEPKSCDKTHTCPPCPAPELLGGPSVFLFPPKPKDTLMISRTPEVTCVVVDVSHEDPEVKFNWYVDGVEVHNAKTKPREEQYNSTYRVVSVLTVLHQDWLNGKEYKCKVSNKALPAPIEKTISKAKGQPREPQVYTLPPSREEMTKNQVSLTCLVKGFYPSDIAVEWESNGQPENNYKTTPPVLDSDGSFFLYSKLTVDKSRWQQGNVFSCSVMHEALHNHYTQKSLSLSPGK

SEQ ID NO: 42 - protein, 330 aa, Artificial Sequence
  Description of Artificial Sequence: Synthetic polypeptide
ASTKGPSVFPLAPSSKSTSGGTAALGCLVKDYFPEPVTVSWNSGALTSGVHTFPAVLQSSGLYSLSSVVTVPSSSLGTQTYICNVNHKPSNTKVDKRVEPKSCDKTHTCPPCPAPELLGGPSVFLFPPKPKDTLMISRTPEVTCVVVDVSHEDPEVKFNWYVDGVEVHNAKTKPREEQYASTYRVVSVLTVLHQDWLNGKEYKCKVSNKALPAPIEKTISKAKGQPREPQVYTLPPSREEMTKNQVSLTCLVKGFYPSDIAVEWESNGQPENNYKTTPPVLDSDGSFFLYSKLTVDKSRWQQGNVFSCSVMHEALHNHYTQKSLSLSPGK

SEQ ID NO: 43 - DNA, 344 bp, Homo sapiens
atgagcatcggcctcctgtgctgtgcagccttgtctctcctgtgggcaggtccagtgaatgctggtgtcactcagaccccaaaattccaggtcctgaagacaggacagagcatgacactgcagtgtgcccaggatatgaaccatgaatacatgtcctggtatcgacaagacccaggcatggggctgaggctgattcattactcagttggtgctggtatcactgaccaaggagaagtccccaatggctacaatgtctccagatcaaccacagaggatttcccgctcaggctgctgtcggctgctccctcccagacatctgtgtacttctgtgccagcagttactc

SEQ ID NO: 44 - protein, 114 aa, Homo sapiens
MSIGLLCCAALSLLWAGPVNAGVTQTPKFQVLKTGQSMTLQCAQDMNHEYMSWYRQDPGMGLRLIHYSVGAGITDQGEVPNGYNVSRSTTEDFPLRLLSAAPSQTSVYFCASSY

SEQ ID NO: 45 - protein, 5 aa, Artificial Sequence
  Description of Artificial Sequence: Synthetic peptide
TYYIH

SEQ ID NO: 46 - protein, 17 aa, Artificial Sequence
  Description of Artificial Sequence: Synthetic peptide
WFFPGSGNIKYNEKFKG

SEQ ID NO: 47 - protein, 10 aa, Artificial Sequence
  Description of Artificial Sequence: Synthetic peptide
SYYSYDVLDY

SEQ ID NO: 48 - protein, 7 aa, Artificial Sequence
  Description of Artificial Sequence: Synthetic peptide
GYSFTTY

SEQ ID NO: 49 - protein, 6 aa, Artificial Sequence
  Description of Artificial Sequence: Synthetic peptide
FPGSGN

SEQ ID NO: 50 - protein, 10 aa, Artificial Sequence
  Description of Artificial Sequence: Synthetic peptide
SYYSYDVLDY

SEQ ID NO: 51 - protein, 11 aa, Artificial Sequence
  Description of Artificial Sequence: Synthetic peptide
KASQNVGINVV

SEQ ID NO: 52 - protein, 7 aa, Artificial Sequence
  Description of Artificial Sequence: Synthetic peptide
SSSHRYS

SEQ ID NO: 53 - protein, 9 aa, Artificial Sequence
  Description of Artificial Sequence: Synthetic peptide
QQFKSYPLT

SEQ ID NO: 54 - protein, 11 aa, Artificial Sequence
  Description of Artificial Sequence: Synthetic peptide
KASQNVGINVV

SEQ ID NO: 55 - protein, 7 aa, Artificial Sequence
  Description of Artificial Sequence: Synthetic peptide
SSSHRYS

SEQ ID NO: 56 - protein, 9 aa, Artificial Sequence
  Description of Artificial Sequence: Synthetic peptide
QQFKSYPLT

SEQ ID NO: 57 - protein, 5 aa, Artificial Sequence
  Description of Artificial Sequence: Synthetic peptide
NFGMH

SEQ ID NO: 58 - protein, 17 aa, Artificial Sequence
  Description of Artificial Sequence: Synthetic peptide
YISSGSSTIYYADTLKG

SEQ ID NO: 59 - protein, 8 aa, Artificial Sequence
  Description of Artificial Sequence: Synthetic peptide
RGEGAMDY

SEQ ID NO: 60 - protein, 7 aa, Artificial Sequence
  Description of Artificial Sequence: Synthetic peptide
GFTFSNF

SEQ ID NO: 61 - protein, 6 aa, Artificial Sequence
  Description of Artificial Sequence: Synthetic peptide
SSGSST

SEQ ID NO: 62 - protein, 8 aa, Artificial Sequence
  Description of Artificial Sequence: Synthetic peptide
RGEGAMDY

SEQ ID NO: 63 - protein, 10 aa, Artificial Sequence
  Description of Artificial Sequence: Synthetic peptide
RASSSVNYIY

SEQ ID NO: 64 - protein, 7 aa, Artificial Sequence
  Description of Artificial Sequence: Synthetic peptide
YTSNLAP

SEQ ID NO: 65 - protein, 9 aa, Artificial Sequence
  Description of Artificial Sequence: Synthetic peptide
QQFTSSPFT

SEQ ID NO: 66 - protein, 10 aa, Artificial Sequence
  Description of Artificial Sequence: Synthetic peptide
RASSSVNYIY

SEQ ID NO: 67 - protein, 7 aa, Artificial Sequence
  Description of Artificial Sequence: Synthetic peptide
YTSNLAP

SEQ ID NO: 68 - protein, 9 aa, Artificial Sequence
  Description of Artificial Sequence: Synthetic peptide
QQFTSSPFT

SEQ ID NO: 69 - protein, 592 aa, Artificial Sequence
  Description of Artificial Sequence: Synthetic polypeptide
METDTLLLWVLLLWVPGSTGQVQLVQSGAEVKKPGSSVKVSCKASGYSFTTYYIHWVRQAPGQGLEWMGWFFPGSGNIKYNEKFKGRVTITADTSTSTAYMELSSLRSEDTAVYYCAGSYYSYDVLDYWGQGTTVTVSSGSASAPTLFPLVSCENSPSDTSSVAVGCLAQDFLPDSITFSWKYKNNSDISSTRGFPSVLRGGKYAATSQVLLPSKDVMQGTDEHVVCKVQHPNGNKEKNVPLPVIAELPPKVSVFVPPRDGFFGNPRKSKLICQATGFSPRQIQVSWLREGKQVGSGVTTDQVQAEAKESGPTTYKVTSTLTIKESDWLGQSMFTCRVDHRGLTFQQNASSMCVPDQDTAIRVFAIPPSFASIFLTKSTKLTCLVTDLTTYDSVTISWTRQNGEAVKTHTNISESHPNATFSAVGEASICEDDWNSGERFTCTVTHTDLASSLKQTISRPKGVALHRPDVYLLPPAREQLNLRESATITCLVTGFSPADVFVQWMQRGQPLSPEKYVTSAPMPEPQAPGRYFAHSILTVSEEEWNTGETYTCVVAHEALPNRVTERTVDKSTGKPTLYNVSLVMSDTAGTCY

SEQ ID NO: 70 - protein, 492 aa, Artificial Sequence
  Description of Artificial Sequence: Synthetic polypeptide
METDTLLLWVLLLWVPGSTGQVQLVQSGAEVKKPGSSVKVSCKASGYSFTTYYIHWVRQAPGQGLEWMGWFFPGSGNIKYNEKFKGRVTITADTSTSTAYMELSSLRSEDTAVYYCAGSYYSYDVLDYWGQGTTVTVSSASPTSPKVFPLSLCSTQPDGNVVIACLVQGFFPQEPLSVTWSESGQGVTARNFPPSQDASGDLYTTSSQLTLPATQCLAGKSVTCHVKHYTNPSQDVTVPCPVPSTPPTPSPSTPPTPSPSCCHPRLSLHRPALEDLLLGSEANLTCTLTGLRDASGVTFTWTPSSGKSAVQGPPERDLCGCYSVSSVLPGCAEPWNHGKTFTCTAAYPESKTPLTATLSKSGNTFRPEVHLLPPPSEELALNELVTLTCLARGFSPKDVLVRWLQGSQELPREKYLTWASRQEPSQGTTTFAVTSILRVAAEDWKKGDTFSCMVGHEALPLAFTQKTIDRLAGKPTHVNVSVVMAEVDGTCY

SEQ ID NO: 71 - protein, 479 aa, Artificial Sequence
  Description of Artificial Sequence: Synthetic polypeptide
METDTLLLWVLLLWVPGSTGQVQLVQSGAEVKKPGSSVKVSCKASGYSFTTYYIHWVRQAPGQGLEWMGWFFPGSGNIKYNEKFKGRVTITADTSTSTAYMELSSLRSEDTAVYYCAGSYYSYDVLDYWGQGTTVTVSSASPTSPKVFPLSLDSTPQDGNVVVACLVQGFFPQEPLSVTWSESGQNVTARNFPPSQDASGDLYTTSSQLTLPATQCPDGKSVTCHVKHYTNSSQDVTVPCRVPPPPPCCHPRLSLHRPALEDLLLGSEANLTCTLTGLRDASGATFTWTPSSGKSAVQGPPERDLCGCYSVSSVLPGCAQPWNHGETFTCTAAHPELKTPLTANITKSGNTFRPEVHLLPPPSEELALNELVTLTCLARGFSPKDVLVRWLQGSQELPREKYLTWASRQEPSQGTTTYAVTSILRVAAEDWKKGETFSCMVGHEALPLAFTQKTIDRMAGKPTHINVSVVMAEADGTCY

SEQ ID NO: 72 - protein, 234 aa, Artificial Sequence
  Description of Artificial Sequence: Synthetic polypeptide
METDTLLLWVLLLWVPGSTGDIQMTQSPSFLSASVGDRVTITCKASQNVGINVVWHQQKPGKAPKALIYSSSHRYSGVPSRFSGSGSGTEFTLTISSLQPEDFATYFCQQFKSYPLTFGQGTKLEIKRTVAAPSVFIFPPSDEQLKSGTASVVCLLNNFYPREAKVQWKVDNALQSGNSQESVTEQDSKDSTYSLSSTLTLSKADYEKHKVYACEVTHQGLSSPVTKSFNRGEC

SEQ ID NO: 73 - protein, 453 aa, Artificial Sequence
  Description of Artificial Sequence: Synthetic polypeptide
GSASAPTLFPLVSCENSPSDTSSVAVGCLAQDFLPDSITFSWKYKNNSDISSTRGFPSVLRGGKYAATSQVLLPSKDVMQGTDEHVVCKVQHPNGNKEKNVPLPVIAELPPKVSVFVPPRDGFFGNPRKSKLICQATGFSPRQIQVSWLREGKQVGSGVTTDQVQAEAKESGPTTYKVTSTLTIKESDWLGQSMFTCRVDHRGLTFQQNASSMCVPDQDTAIRVFAIPPSFASIFLTKSTKLTCLVTDLTTYDSVTISWTRQNGEAVKTHTNISESHPNATFSAVGEASICEDDWNSGERFTCTVTHTDLASSLKQTISRPKGVALHRPDVYLLPPAREQLNLRESATITCLVTGFSPADVFVQWMQRGQPLSPEKYVTSAPMPEPQAPGRYFAHSILTVSEEEWNTGETYTCVVAHEALPNRVTERTVDKSTGKPTLYNVSLVMSDTAGTCY

SEQ ID NO: 74 - protein, 353 aa, Homo sapiens
ASPTSPKVFPLSLCSTQPDGNVVIACLVQGFFPQEPLSVTWSESGQGVTARNFPPSQDASGDLYTTSSQLTLPATQCLAGKSVTCHVKHYTNPSQDVTVPCPVPSTPPTPSPSTPPTPSPSCCHPRLSLHRPALEDLLLGSEANLTCTLTGLRDASGVTFTWTPSSGKSAVQGPPERDLCGCYSVSSVLPGCAEPWNHGKTFTCTAAYPESKTPLTATLSKSGNTFRPEVHLLPPPSEELALNELVTLTCLARGFSPKDVLVRWLQGSQELPREKYLTWASRQEPSQGTTTFAVTSILRVAAEDWKKGDTFSCMVGHEALPLAFTQKTIDRLAGKPTHVNVSVVMAEVDGTCY

SEQ ID NO: 75 - protein, 340 aa, Homo sapiens
ASPTSPKVFPLSLDSTPQDGNVVVACLVQGFFPQEPLSVTWSESGQNVTARNFPPSQDASGDLYTTSSQLTLPATQCPDGKSVTCHVKHYTNSSQDVTVPCRVPPPPPCCHPRLSLHRPALEDLLLGSEANLTCTLTGLRDASGATFTWTPSSGKSAVQGPPERDLCGCYSVSSVLPGCAQPWNHGETFTCTAAHPELKTPLTANITKSGNTFRPEVHLLPPPSEELALNELVTLTCLARGFSPKDVLVRWLQGSQELPREKYLTWASRQEPSQGTTTYAVTSILRVAAEDWKKGETFSCMVGHEALPLAFTQKTIDRMAGKPTHINVSVVMAEADGTCY

SEQ ID NO: 76 - protein, 159 aa, Homo sapiens
MKNHLLFWGVLAVFIKAVHVKAQEDERIVLVDNKCKCARITSRIIRSSEDPNEDIVERNIRIIVPLNNRENISDPTSPLRTRFVYHLSDLCKKCDPTEVELDNQIVTATQSNICDEDSATETCYTYDRNKCYTAVVPLVYGGETKMVETALTPDACYPD

SEQ ID NO: 77-79 - skipped (3 entries)

SEQ ID NO: 80 - protein, 246 aa, Artificial Sequence
  Description of Artificial Sequence: Synthetic polypeptide
QVQLVQSGAEVKKPGSSVKVSCKASGTDFKLTYIHWVRQAPGQGLEWMGRVSPGSGNTKYNEKFKGRVTITADTSTSTAYMELSSLRSEDTAVYYCAGSYYSYDVLDYWGQGTTVTVSSGGGGSGGGGSGGGGSGGGGSDIQMTQSPSFLSASVGDRVTITCKASQNVEDRVAWYQQKPGKAPKALIYSSSHRYKGVPSRFSGSGSGTEFTLTISSLQPEDFATYFCQQFKSYPLTFGQGTKLEIK

SEQ ID NO: 81 - protein, 107 aa, Artificial Sequence
  Description of Artificial Sequence: Synthetic polypeptide
DIQMTQSPSFLSASVGDRVTITCKASQNVEDRVAWYQQKPGKAPKALIYSSSHRYKGVPSRFSGSGSGTEFTLTISSLQPEDFATYFCQQFKSYPLTFGQGTKLEIK

SEQ ID NO: 82 - protein, 119 aa, Artificial Sequence
  Description of Artificial Sequence: Synthetic polypeptide
QVQLVQSGAEVKKPGSSVKVSCKASGTDFKLTYIHWVRQAPGQGLEWMGRVSPGSGNTKYNEKFKGRVTITADTSTSTAYMELSSLRSEDTAVYYCAGSYYSYDVLDYWGQGTTVTVSS

SEQ ID NO: 83 - protein, 246 aa, Artificial Sequence
  Description of Artificial Sequence: Synthetic polypeptide
QVQLVQSGAEVKKPGSSVKVSCKASGTDFDKIYIHWVRQAPGQGLEWMGRISAGSGNVKYNEKFKGRVTITADTSTSTAYMELSSLRSEDTAVYYCAGSYYSYDVLDYWGQGTTVTVSSGGGGSGGGGSGGGGSGGGGSDIQMTQSPSFLSASVGDRVTITCKASQNVEDRVAWYQQKPGKAPKALIYSSSHRYKGVPSRFSGSGSGTEFTLTISSLQPEDFATYFCQQFKSYPLTFGQGTKLEIK

SEQ ID NO: 84 - protein, 107 aa, Artificial Sequence; identical to SEQ ID NO: 81
  Description of Artificial Sequence: Synthetic polypeptide

SEQ ID NO: 85 - protein, 119 aa, Artificial Sequence
  Description of Artificial Sequence: Synthetic polypeptide
QVQLVQSGAEVKKPGSSVKVSCKASGTDFDKIYIHWVRQAPGQGLEWMGRISAGSGNVKYNEKFKGRVTITADTSTSTAYMELSSLRSEDTAVYYCAGSYYSYDVLDYWGQGTTVTVSS

SEQ ID NO: 86 - protein, 246 aa, Artificial Sequence
  Description of Artificial Sequence: Synthetic polypeptide
QVQLVQSGAEVKKPGSSVKVSCKASGHDFRDFYIHWVRQAPGQGLEWMGRVYPGSGSYRYNEKFKGRVTITADTSTSTAYMELSSLRSEDTAVYYCAGSYYSYDVLDYWGQGTTVTVSSGGGGSGGGGSGGGGSGGGGSDIQMTQSPSFLSASVGDRVTITCKASQNVDDRVAWYQQKPGKAPKALIYSSSHRYKGVPSRFSGSGSGTEFTLTISSLQPEDFATYFCQQFKSYPLTFGQGTKLEIK

SEQ ID NO: 87 - protein, 107 aa, Artificial Sequence
  Description of Artificial Sequence: Synthetic polypeptide
DIQMTQSPSFLSASVGDRVTITCKASQNVDDRVAWYQQKPGKAPKALIYSSSHRYKGVPSRFSGSGSGTEFTLTISSLQPEDFATYFCQQFKSYPLTFGQGTKLEIK

SEQ ID NO: 88 - protein, 119 aa, Artificial Sequence
  Description of Artificial Sequence: Synthetic polypeptide
QVQLVQSGAEVKKPGSSVKVSCKASGHDFRDFYIHWVRQAPGQGLEWMGRVYPGSGSYRYNEKFKGRVTITADTSTSTAYMELSSLRSEDTAVYYCAGSYYSYDVLDYWGQGTTVTVSS

SEQ ID NO: 89 - protein, 246 aa, Artificial Sequence
  Description of Artificial Sequence: Synthetic polypeptide
QVQLVQSGAEVKKPGSSVKVSCKASGHDFKLTYIHWVRQAPGQGLEWMGRISAGSGNVKYNEKFKGRVTITADTSTSTAYMELSSLRSEDTAVYYCAGSYYSYDVLDYWGQGTTVTVSSGGGGSGGGGSGGGGSGGGGSDIQMTQSPSFLSASVGDRVTITCKASQNVDNRVAWYQQKPGKAPKALIYSSSHRYKGVPSRFSGSGSGTEFTLTISSLQPEDFATYFCQQFKSYPLTFGQGTKLEIK

SEQ ID NO: 90 - protein, 107 aa, Artificial Sequence
  Description of Artificial Sequence: Synthetic polypeptide
DIQMTQSPSFLSASVGDRVTITCKASQNVDNRVAWYQQKPGKAPKALIYSSSHRYKGVPSRFSGSGSGTEFTLTISSLQPEDFATYFCQQFKSYPLTFGQGTKLEIK

SEQ ID NO: 91 - protein, 119 aa, Artificial Sequence
  Description of Artificial Sequence: Synthetic polypeptide
QVQLVQSGAEVKKPGSSVKVSCKASGHDFKLTYIHWVRQAPGQGLEWMGRISAGSGNVKYNEKFKGRVTITADTSTSTAYMELSSLRSEDTAVYYCAGSYYSYDVLDYWGQGTTVTVSS

SEQ ID NO: 92 - protein, 246 aa, Artificial Sequence
  Description of Artificial Sequence: Synthetic polypeptide
QVQLVQSGAEVKKPGSSVKVSCKASGTDFKLTYIHWVRQAPGQGLEWMGRIFPGSGNVKYNEKFKGRVTITADTSTSTAYMELSSLRSEDTAVYYCAGSYYSYDVLDYWGQGTTVTVSSGGGGSGGGGSGGGGSGGGGSDIQMTQSPSFLSASVGDRVTITCKASQNVENKVAWHQQKPGKAPKALIYSSSHRYKGVPSRFSGSGSGTEFTLTISSLQPEDFATYFCQQFKSYPLTFGQGTKLEIK

SEQ ID NO: 93 - protein, 107 aa, Artificial Sequence
  Description of Artificial Sequence: Synthetic polypeptide
DIQMTQSPSFLSASVGDRVTITCKASQNVENKVAWHQQKPGKAPKALIYSSSHRYKGVPSRFSGSGSGTEFTLTISSLQPEDFATYFCQQFKSYPLTFGQGTKLEIK

SEQ ID NO: 94 - protein, 119 aa, Artificial Sequence
  Description of Artificial Sequence: Synthetic polypeptide
QVQLVQSGAEVKKPGSSVKVSCKASGTDFKLTYIHWVRQAPGQGLEWMGRIFPGSGNVKYNEKFKGRVTITADTSTSTAYMELSSLRSEDTAVYYCAGSYYSYDVLDYWGQGTTVTVSS

SEQ ID NO: 95 - protein, 246 aa, Artificial Sequence
  Description of Artificial Sequence: Synthetic polypeptide
QVQLVQSGAEVKKPGSSVKVSCKASGTDFDKIYIHWVRQAPGQGLEWMGRIFAGSGNTKYNEKFKGRVTITADTSTSTAYMELSSLRSEDTAVYYCAGSYYSYDVLDYWGQGTTVTVSSGGGGSGGGGSGGGGSGGGGSDIQMTQSPSFLSASVGDRVTITCKASQNVDDRVAWYQQKPGKAPKALIYSSSHRYKGVPSRFSGSGSGTEFTLTISSLQPEDFATYFCQQFKSYPLTFGQGTKLEIK

SEQ ID NO: 96 - protein, 107 aa, Artificial Sequence; identical to SEQ ID NO: 87
  Description of Artificial Sequence: Synthetic polypeptide

SEQ ID NO: 97 - protein, 119 aa, Artificial Sequence
  Description of Artificial Sequence: Synthetic polypeptide
QVQLVQSGAEVKKPGSSVKVSCKASGTDFDKIYIHWVRQAPGQGLEWMGRIFAGSGNTKYNEKFKGRVTITADTSTSTAYMELSSLRSEDTAVYYCAGSYYSYDVLDYWGQGTTVTVSS

SEQ ID NO: 98 - protein, 246 aa, Artificial Sequence
  Description of Artificial Sequence: Synthetic polypeptide
QVQLVQSGAEVKKPGSSVKVSCKASGHDFDKFYIHWVRQAPGQGLEWMGRVSAGSGNVKYNEKFKGRVTITADTSTSTAYMELSSLRSEDTAVYYCAGSYYSYDVLDYWGQGTTVTVSSGGGGSGGGGSGGGGSGGGGSDIQMTQSPSFLSASVGDRVTITCKASQNVGNRVAWYQQKPGKAPKALIYSSSHRYSGVPSRFSGSGSGTEFTLTISSLQPEDFATYFCQQFKSYPLTFGQGTKLEIK

SEQ ID NO: 99 - protein, 107 aa, Artificial Sequence
  Description of Artificial Sequence: Synthetic polypeptide
DIQMTQSPSFLSASVGDRVTITCKASQNVGNRVAWYQQKPGKAPKALIYSSSHRYSGVPSRFSGSGSGTEFTLTISSLQPEDFATYFCQQFKSYPLTFGQGTKLEIK

SEQ ID NO: 100 - protein, 119 aa, Artificial Sequence
  Description of Artificial Sequence: Synthetic polypeptide
QVQLVQSGAEVKKPGSSVKVSCKASGHDFDKFYIHWVRQAPGQGLEWMGRVSAGSGNVKYNEKFKGRVTITADTSTSTAYMELSSLRSEDTAVYYCAGSYYSYDVLDYWGQGTTVTVSS

SEQ ID NO: 101 - protein, 247 aa, Artificial Sequence
  Description of Artificial Sequence: Synthetic polypeptide
QVQLVQSGAEVKKPGSSVKVSCKASGHDFDKFYIHWVRQAPGQGLEWMGRIFAGSGNVKYNEKFKGRVTITADTSTSTAYMELSSLRSEDTAVYYCAGSYYSYDVLDYWGQGTTVTVSSGGGGSGGGGSGGGGSGGGGSDIQMTQSPSFLSASVGDRVTITCKASQNVGDRVAWYQQKPGKAPKALIYSSSHRYKGVPSRFSGSGSGTEFTLTISSLQPEDFATYFCQQFKSYPLTFGQGTKLEIKS

SEQ ID NO: 102 - protein, 107 aa, Artificial Sequence
  Description of Artificial Sequence: Synthetic polypeptide
DIQMTQSPSFLSASVGDRVTITCKASQNVGDRVAWYQQKPGKAPKALIYSSSHRYKGVPSRFSGSGSGTEFTLTISSLQPEDFATYFCQQFKSYPLTFGQGTKLEIK

SEQ ID NO: 103 - protein, 119 aa, Artificial Sequence
  Description of Artificial Sequence: Synthetic polypeptide
QVQLVQSGAEVKKPGSSVKVSCKASGHDFDKFYIHWVRQAPGQGLEWMGRIFAGSGNVKYNEKFKGRVTITADTSTSTAYMELSSLRSEDTAVYYCAGSYYSYDVLDYWGQGTTVTVSS

SEQ ID NO: 104 - protein, 246 aa, Artificial Sequence
  Description of Artificial Sequence: Synthetic polypeptide
QVQLVQSGAEVKKPGSSVKVSCKASGTDFKLTYIHWVRQAPGQGLEWMGRVSPGSGNVKYNEKFKGRVTITADTSTSTAYMELSSLRSEDTAVYYCAGSYYSYDVLDYWGQGTTVTVSSGGGGSGGGGSGGGGSGGGGSDIQMTQSPSFLSASVGDRVTITCKASQNVGDRVAWYQQKPGKAPKALIYSSSHRYKGVPSRFSGSGSGTEFTLTISSLQPEDFATYFCQQFKSYPLTFGQGTKLEIK

SEQ ID NO: 105 - protein, 107 aa, Artificial Sequence; identical to SEQ ID NO: 102
  Description of Artificial Sequence: Synthetic polypeptide

SEQ ID NO: 106 - protein, 119 aa, Artificial Sequence
  Description of Artificial Sequence: Synthetic polypeptide
QVQLVQSGAEVKKPGSSVKVSCKASGTDFKLTYIHWVRQAPGQGLEWMGRVSPGSGNVKYNEKFKGRVTITADTSTSTAYMELSSLRSEDTAVYYCAGSYYSYDVLDYWGQGTTVTVSS

SEQ ID NO: 107 - protein, 246 aa, Artificial Sequence
  Description of Artificial Sequence: Synthetic polypeptide
QVQLVQSGAEVKKPGSSVKVSCKASGTDFDKIYIHWVRQAPGQGLEWMGRVSAGSGNTKYNEKFKGRVTITADTSTSTAYMELSSLRSEDTAVYYCAGSYYSYDVLDYWGQGTTVTVSSGGGGSGGGGSGGGGSGGGGSDIQMTQSPSFLSASVGDRVTITCKASQNVGNRVAWYQQKPGKAPKALIYSSSHRYKGVPSRFSGSGSGTEFTLTISSLQPEDFATYFCQQFKSYPLTFGQGTKLEIK

SEQ ID NO: 108 - protein, 107 aa, Artificial Sequence
  Description of Artificial Sequence: Synthetic polypeptide
DIQMTQSPSFLSASVGDRVTITCKASQNVGNRVAWYQQKPGKAPKALIYSSSHRYKGVPSRFSGSGSGTEFTLTISSLQPEDFATYFCQQFKSYPLTFGQGTKLEIK

SEQ ID NO: 109 - protein, 119 aa, Artificial Sequence
  Description of Artificial Sequence: Synthetic polypeptide
QVQLVQSGAEVKKPGSSVKVSCKASGTDFDKIYIHWVRQAPGQGLEWMGRVSAGSGNTKYNEKFKGRVTITADTSTSTAYMELSSLRSEDTAVYYCAGSYYSYDVLDYWGQGTTVTVSS

SEQ ID NO: 110 - protein, 246 aa, Artificial Sequence
  Description of Artificial Sequence: Synthetic polypeptide
QVQLVQSGAEVKKPGSSVKVSCKASGTDFKLTYIHWVRQAPGQGLEWMGRIFPGSGNVKYNEKFKGRVTITADTSTSTAYMELSSLRSEDTAVYYCAGSYYSYDVLDYWGQGTTVTVSSGGGGSGGGGSGGGGSGGGGSDIQMTQSPSFLSASVGDRVTITCKASQNVDNRVAWYQQKPGKAPKALIYSSSHRYKGVPSRFSGSGSGTEFTLTISSLQPEDFATYFCQQFKSYPLTFGQGTKLEIK

SEQ ID NO: 111 - protein, 107 aa, Artificial Sequence; identical to SEQ ID NO: 90
  Description of Artificial Sequence: Synthetic polypeptide

SEQ ID NO: 112 - protein, 119 aa, Artificial Sequence; identical to SEQ ID NO: 94
  Description of Artificial Sequence: Synthetic polypeptide

SEQ ID NO: 113 - protein, 246 aa, Artificial Sequence
  Description of Artificial Sequence: Synthetic polypeptide
QVQLVQSGAEVKKPGSSVKVSCKASGTDFDKIYIHWVRQAPGQGLEWMGRISAGSGNTKYNEKFKGRVTITADTSTSTAYMELSSLRSEDTAVYYCAGSYYSYDVLDYWGQGTTVTVSSGGGGSGGGGSGGGGSGGGGSDIQMTQSPSFLSASVGDRVTITCKASQNVDDRVAWYQQKPGKAPKALIYSSSHRYKGVPSRFSGSGSGTEFTLTISSLQPEDFATYFCQQFKSYPLTFGQGTKLEIK

SEQ ID NO: 114 - protein, 107 aa, Artificial Sequence; identical to SEQ ID NO: 87
  Description of Artificial Sequence: Synthetic polypeptide

SEQ ID NO: 115 - protein, 119 aa, Artificial Sequence
  Description of Artificial Sequence: Synthetic polypeptide
QVQLVQSGAEVKKPGSSVKVSCKASGTDFDKIYIHWVRQAPGQGLEWMGRISAGSGNTKYNEKFKGRVTITADTSTSTAYMELSSLRSEDTAVYYCAGSYYSYDVLDYWGQGTTVTVSS

SEQ ID NO: 116 - protein, 246 aa, Artificial Sequence
  Description of Artificial Sequence: Synthetic polypeptide
QVQLVQSGAEVKKPGSSVKVSCKASGTDFRLTYIHWVRQAPGQGLEWMGRVSPGSGNTKYNEKFKGRVTITADTSTSTAYMELSSLRSEDTAVYYCAGSYYSYDVLDYWGQGTTVTVSSGGGGSGGGGSGGGGSGGGGSDIQMTQSPSFLSASVGDRVTITCKASQNVDNKVAWHQQKPGKAPKALIYSSSHRYKGVPSRFSGSGSGTEFTLTISSLQPEDFATYFCQQFKSYPLTFGQGTKLEIK

SEQ ID NO: 117 - protein, 107 aa, Artificial Sequence
  Description of Artificial Sequence: Synthetic polypeptide
DIQMTQSPSFLSASVGDRVTITCKASQNVDNKVAWHQQKPGKAPKALIYSSSHRYKGVPSRFSGSGSGTEFTLTISSLQPEDFATYFCQQFKSYPLTFGQGTKLEIK

SEQ ID NO: 118 - protein, 119 aa, Artificial Sequence
  Description of Artificial Sequence: Synthetic polypeptide
QVQLVQSGAEVKKPGSSVKVSCKASGTDFRLTYIHWVRQAPGQGLEWMGRVSPGSGNTKYNEKFKGRVTITADTSTSTAYMELSSLRSEDTAVYYCAGSYYSYDVLDYWGQGTTVTVSS

SEQ ID NO: 119 - protein, 246 aa, Artificial Sequence
  Description of Artificial Sequence: Synthetic polypeptide
QVQLVQSGAEVKKPGSSVKVSCKASGGTFRLTYIHWVRQAPGQGLEWMGRVYPGSGNTKYNEKFKGRVTITADTSTSTAYMELSSLRSEDTAVYYCAGSYYSYDVLDYWGQGTTVTVSSGGGGSGGGGSGGGGSGGGGSDIQMTQSPSFLSASVGDRVTITCKASQNVDDRVAWYQQKPGKAPKALIYSSSHRYKGVPSRFSGSGSGTEFTLTISSLQPEDFATYFCQQFKSYPLTFGQGTKLEIK

SEQ ID NO: 120 - protein, 107 aa, Artificial Sequence; identical to SEQ ID NO: 87
  Description of Artificial Sequence: Synthetic polypeptide

SEQ ID NO: 121 - protein, 119 aa, Artificial Sequence
  Description of Artificial Sequence: Synthetic polypeptide
QVQLVQSGAEVKKPGSSVKVSCKASGGTFRLTYIHWVRQAPGQGLEWMGRVYPGSGNTKYNEKFKGRVTITADTSTSTAYMELSSLRSEDTAVYYCAGSYYSYDVLDYWGQGTTVTVSS

SEQ ID NO: 122 - protein, 246 aa, Artificial Sequence
  Description of Artificial Sequence: Synthetic polypeptide
QVQLVQSGAEVKKPGSSVKVSCKASGTDFRLTYIHWVRQAPGQGLEWMGRIFPGSGNTKYNEKFKGRVTITADTSTSTAYMELSSLRSEDTAVYYCAGSYYSYDVLDYWGQGTTVTVSSGGGGSGGGGSGGGGSGGGGSDIQMTQSPSFLSASVGDRVTITCKASQNVDDRVAWYQQKPGKAPKALIYSSSHRYKGVPSRFSGSGSGTEFTLTISSLQPEDFATYFCQQFKSYPLTFGQGTKLEIK

SEQ ID NO: 123 - protein, 107 aa, Artificial Sequence; identical to SEQ ID NO: 87
  Description of Artificial Sequence: Synthetic polypeptide

SEQ ID NO: 124 - protein, 119 aa, Artificial Sequence
  Description of Artificial Sequence: Synthetic polypeptide
QVQLVQSGAEVKKPGSSVKVSCKASGTDFRLTYIHWVRQAPGQGLEWMGRIFPGSGNTKYNEKFKGRVTITADTSTSTAYMELSSLRSEDTAVYYCAGSYYSYDVLDYWGQGTTVTVSS

SEQ ID NO: 125 - protein, 246 aa, Artificial Sequence
  Description of Artificial Sequence: Synthetic polypeptide
QVQLVQSGAEVKKPGSSVKVSCKASGTDFKLTYIHWVRQAPGQGLEWMGRIFPGSGNVKYNEKFKGRVTITADTSTSTAYMELSSLRSEDTAVYYCAGSYYSYDVLDYWGQGTTVTVSSGGGGSGGGGSGGGGSGGGGSDIQMTQSPSFLSASVGDRVTITCKASQNVEDRVAWYQQKPGKAPKALIYSSSHRYKGVPSRFSGSGSGTEFTLTISSLQPEDFATYFCQQFKSYPLTFGQGTKLEIK

SEQ ID NO: 126 - protein, 107 aa, Artificial Sequence; identical to SEQ ID NO: 81
  Description of Artificial Sequence: Synthetic polypeptide

SEQ ID NO: 127 - protein, 119 aa, Artificial Sequence; identical to SEQ ID NO: 94
  Description of Artificial Sequence: Synthetic polypeptide

SEQ ID NO: 128 - protein, 246 aa, Artificial Sequence
  Description of Artificial Sequence: Synthetic polypeptide
QVQLVQSGAEVKKPGSSVKVSCKASGGTFRLTYIHWVRQAPGQGLEWMGRISAGSGNVKYNEKFKGRVTITADTSTSTAYMELSSLRSEDTAVYYCAGSYYSYDVLDYWGQGTTVTVSSGGGGSGGGGSGGGGSGGGGSDIQMTQSPSFLSASVGDRVTITCKASQNVGDRVAWYQQKPGKAPKALIYSSSHRYKGVPSRFSGSGSGTEFTLTISSLQPEDFATYFCQQFKSYPLTFGQGTKLEIK

SEQ ID NO: 129 - protein, 107 aa, Artificial Sequence; identical to SEQ ID NO: 102
  Description of Artificial Sequence: Synthetic polypeptide

SEQ ID NO: 130 - protein, 119 aa, Artificial Sequence
  Description of Artificial Sequence: Synthetic polypeptide
QVQLVQSGAEVKKPGSSVKVSCKASGGTFRLTYIHWVRQAPGQGLEWMGRISAGSGNVKYNEKFKGRVTITADTSTSTAYMELSSLRSEDTAVYYCAGSYYSYDVLDYWGQGTTVTVSS

SEQ ID NO: 131 - protein, 246 aa, Artificial Sequence
  Description of Artificial Sequence: Synthetic polypeptide
QVQLVQSGAEVKKPGSSVKVSCKASGGTFDKTYIHWVRQAPGQGLEWMGRISAGSGNTKYNEKFKGRVTITADTSTSTAYMELSSLRSEDTAVYYCAGSYYSYDVLDYWGQGTTVTVSSGGGGSGGGGSGGGGSGGGGSDIQMTQSPSFLSASVGDRVTITCKASQNVDDRVAWYQQKPGKAPKALIYSSSHRYKGVPSRFSGSGSGTEFTLTISSLQPEDFATYFCQQFKSYPLTFGQGTKLEIK

SEQ ID NO: 132 - protein, 107 aa, Artificial Sequence; identical to SEQ ID NO: 87
  Description of Artificial Sequence: Synthetic polypeptide

SEQ ID NO: 133 - protein, 119 aa, Artificial Sequence
  Description of Artificial Sequence: Synthetic polypeptide
QVQLVQSGAEVKKPGSSVKVSCKASGGTFDKTYIHWVRQAPGQGLEWMGRISAGSGNTKYNEKFKGRVTITADTSTSTAYMELSSLRSEDTAVYYCAGSYYSYDVLDYWGQGTTVTVSS

SEQ ID NO: 134 - protein, 246 aa, Artificial Sequence
  Description of Artificial Sequence: Synthetic polypeptide
QVQLVQSGAEVKKPGSSVKVSCKASGHDFDKFYIHWVRQAPGQGLEWMGRISAGSGNTKYNEKFKGRVTITADTSTSTAYMELSSLRSEDTAVYYCAGSYYSYDVLDYWGQGTTVTVSSGGGGSGGGGSGGGGSGGGGSDIQMTQSPSFLSASVGDRVTITCKASQNVDDRVAWYQQKPGKAPKALIYSSSHRYKGVPSRFSGSGSGTEFTLTISSLQPEDFATYFCQQFKSYPLTFGQGTKLEIK

SEQ ID NO: 135 - protein, 107 aa, Artificial Sequence; identical to SEQ ID NO: 87
  Description of Artificial Sequence: Synthetic polypeptide

SEQ ID NO: 136 - protein, 119 aa, Artificial Sequence
  Description of Artificial Sequence: Synthetic polypeptide
QVQLVQSGAEVKKPGSSVKVSCKASGHDFDKFYIHWVRQAPGQGLEWMGRISAGSGNTKYNEKFKGRVTITADTSTSTAYMELSSLRSEDTAVYYCAGSYYSYDVLDYWGQGTTVTVSS

SEQ ID NO: 137 - protein, 246 aa, Artificial Sequence
  Description of Artificial Sequence: Synthetic polypeptide
QVQLVQSGAEVKKPGSSVKVSCKASGTDFKLTYIHWVRQAPGQGLEWMGRISAGSGNVKYNEKFKGRVTITADTSTSTAYMELSSLRSEDTAVYYCAGSYYSYDVLDYWGQGTTVTVSSGGGGSGGGGSGGGGSGGGGSDIQMTQSPSFLSASVGDRVTITCKASQNVDNKVAWHQQKPGKAPKALIYSSSHRYKGVPSRFSGSGSGTEFTLTISSLQPEDFATYFCQQFKSYPLTFGQGTKLEIK

SEQ ID NO: 138 - protein, 107 aa, Artificial Sequence; identical to SEQ ID NO: 117
  Description of Artificial Sequence: Synthetic polypeptide

SEQ ID NO: 139 - protein, 119 aa, Artificial Sequence
  Description of Artificial Sequence: Synthetic polypeptide
QVQLVQSGAEVKKPGSSVKVSCKASGTDFKLTYIHWVRQAPGQGLEWMGRISAGSGNVKYNEKFKGRVTITADTSTSTAYMELSSLRSEDTAVYYCAGSYYSYDVLDYWGQGTTVTVSS

SEQ ID NO: 140 - protein, 246 aa, Artificial Sequence
  Description of Artificial Sequence: Synthetic polypeptide
QVQLVQSGAEVKKPGSSVKVSCKASGHDFRLTYIHWVRQAPGQGLEWMGRISAGSGNVKYNEKFKGRVTITADTSTSTAYMELSSLRSEDTAVYYCAGSYYSYDVLDYWGQGTTVTVSSGGGGSGGGGSGGGGSGGGGSDIQMTQSPSFLSASVGDRVTITCKASQNVADRVAWYQQKPGKAPKALIYSSSHRYKGVPSRFSGSGSGTEFTLTISSLQPEDFATYFCQQFKSYPLTFGQGTKLEIK

SEQ ID NO: 141 - protein, 107 aa, Artificial Sequence
  Description of Artificial Sequence: Synthetic polypeptide
DIQMTQSPSFLSASVGDRVTITCKASQNVADRVAWYQQKPGKAPKALIYSSSHRYKGVPSRFSGSGSGTEFTLTISSLQPEDFATYFCQQFKSYPLTFGQGTKLEIK

SEQ ID NO: 142 - protein, 119 aa, Artificial Sequence
  Description of Artificial Sequence: Synthetic polypeptide
QVQLVQSGAEVKKPGSSVKVSCKASGHDFRLTYIHWVRQAPGQGLEWMGRISAGSGNVKYNEKFKGRVTITADTSTSTAYMELSSLRSEDTAVYYCAGSYYSYDVLDYWGQGTTVTVSS

SEQ ID NO: 143 - protein, 246 aa, Artificial Sequence
  Description of Artificial Sequence: Synthetic polypeptide
QVQLVQSGAEVKKPGSSVKVSCKASGHDFHLWYIHWVRQAPGQGLEWMGRVSAGSGNVKYNEKFKGRVTITADTSTSTAYMELSSLRSEDTAVYYCAGSYYSYDVLDYWGQGTTVTVSSGGGGSGGGGSGGGGSGGGGSDIQMTQSPSFLSASVGDRVTITCKASQNVDNKVAWHQQKPGKAPKALIYSSSHRYKGVPSRFSGSGSGTEFTLTISSLQPEDFATYFCQQFKSYPLTFGQGTKLEIK

SEQ ID NO: 144 - protein, 107 aa, Artificial Sequence; identical to SEQ ID NO: 117
  Description of Artificial Sequence: Synthetic polypeptide

SEQ ID NO: 145 - protein, 119 aa, Artificial Sequence
  Description of Artificial Sequence: Synthetic polypeptide
QVQLVQSGAEVKKPGSSVKVSCKASGHDFHLWYIHWVRQAPGQGLEWMGRVSAGSGNVKYNEKFKGRVTITADTSTSTAYMELSSLRSEDTAVYYCAGSYYSYDVLDYWGQGTTVTVSS

SEQ ID NO: 146 - protein, 246 aa, Artificial Sequence
  Description of Artificial Sequence: Synthetic polypeptide
QVQLVQSGAEVKKPGSSVKVSCKASGHDFHLWYIHWVRQAPGQGLEWMGRVFAGSGNTKYNEKFKGRVTITADTSTSTAYMELSSLRSEDTAVYYCAGSYYSYDVLDYWGQGTTVTVSSGGGGSGGGGSGGGGSGGGGSDIQMTQSPSFLSASVGDRVTITCKASQNVEDKVAWYQQKPGKAPKALIYSSSHRYKGVPSRFSGSGSGTEFTLTISSLQPEDFATYFCQQFKSYPLTFGQGTKLEIK

SEQ ID NO: 147 - protein, 107 aa, Artificial Sequence
  Description of Artificial Sequence: Synthetic polypeptide
DIQMTQSPSFLSASVGDRVTITCKASQNVEDKVAWYQQKPGKAPKALIYSSSHRYKGVPSRFSGSGSGTEFTLTISSLQPEDFATYFCQQFKSYPLTFGQGTKLEIK

SEQ ID NO: 148 - protein, 119 aa, Artificial Sequence
  Description of Artificial Sequence: Synthetic polypeptide
QVQLVQSGAEVKKPGSSVKVSCKASGHDFHLWYIHWVRQAPGQGLEWMGRVFAGSGNTKYNEKFKGRVTITADTSTSTAYMELSSLRSEDTAVYYCAGSYYSYDVLDYWGQGTTVTVSS

SEQ ID NO: 149 - protein, 246 aa, Artificial Sequence
  Description of Artificial Sequence: Synthetic polypeptide
QVQLVQSGAEVKKPGSSVKVSCKASGTDFKLTYIHWVRQAPGQGLEWMGRIFPGSGNTKYNEKFKGRVTITADTSTSTAYMELSSLRSEDTAVYYCAGSYYSYDVLDYWGQGTTVTVSSGGGGSGGGGSGGGGSGGGGSDIQMTQSPSFLSASVGDRVTITCKASQNVDDRVAWYQQKPGKAPKALIYSSSHRYKGVPSRFSGSGSGTEFTLTISSLQPEDFATYFCQQFKSYPLTFGQGTKLEIK

SEQ ID NO: 150 - protein, 107 aa, Artificial Sequence; identical to SEQ ID NO: 87
  Description of Artificial Sequence: Synthetic polypeptide

SEQ ID NO: 151 - protein, 119 aa, Artificial Sequence
  Description of Artificial Sequence: Synthetic polypeptide
QVQLVQSGAEVKKPGSSVKVSCKASGTDFKLTYIHWVRQAPGQGLEWMGRIFPGSGNTKYNEKFKGRVTITADTSTSTAYMELSSLRSEDTAVYYCAGSYYSYDVLDYWGQGTTVTVSS

SEQ ID NO: 152 - skipped

SEQ ID NO: 153 - protein, 246 aa, Artificial Sequence
  Description of Artificial Sequence: Synthetic polypeptide
QVQLVQSGAEVKKPGSSVKVSCKASGTDFKLTYIHWVRQAPGQGLEWMGRVSAGSGNVKYNEKFKGRVTITADTSTSTAYMELSSLRSEDTAVYYCAGSYYSYDVLDYWGQGTTVTVSSGGGGSGGGGSGGGGSGGGGSDIQMTQSPSFLSASVGDRVTITCKASQNVGNRVAWYQQKPGKAPKALIYSSSHRYKGVPSRFSGSGSGTEFTLTISSLQPEDFATYFCQQFKSYPLTFGQGTKLEIK

SEQ ID NO: 154 - protein, 107 aa, Artificial Sequence; identical to SEQ ID NO: 108
  Description of Artificial Sequence: Synthetic polypeptide

SEQ ID NO: 155 - protein, 119 aa, Artificial Sequence
  Description of Artificial Sequence: Synthetic polypeptide
QVQLVQSGAEVKKPGSSVKVSCKASGTDFKLTYIHWVRQAPGQGLEWMGRVSAGSGNVKYNEKFKGRVTITADTSTSTAYMELSSLRSEDTAVYYCAGSYYSYDVLDYWGQGTTVTVSS

SEQ ID NO: 156 - protein, 246 aa, Artificial Sequence
  Description of Artificial Sequence: Synthetic polypeptide
QVQLVQSGAEVKKPGSSVKVSCKASGTDFKLTYIHWVRQAPGQGLEWMGRISPGSGNTKYNEKFKGRVTITADTSTSTAYMELSSLRSEDTAVYYCAGSYYSYDVLDYWGQGTTVTVSSGGGGSGGGGSGGGGSGGGGSDIQMTQSPSFLSASVGDRVTITCKASQNVGDRVAWYQQKPGKAPKALIYSSSHRYKGVPSRFSGSGSGTEFTLTISSLQPEDFATYFCQQFKSYPLTFGQGTKLEIK

SEQ ID NO: 157 - protein, 107 aa, Artificial Sequence; identical to SEQ ID NO: 102
  Description of Artificial Sequence: Synthetic polypeptide

SEQ ID NO: 158 - protein, 119 aa, Artificial Sequence
  Description of Artificial Sequence: Synthetic polypeptide
QVQLVQSGAEVKKPGSSVKVSCKASGTDFKLTYIHWVRQAPGQGLEWMGRISPGSGNTKYNEKFKGRVTITADTSTSTAYMELSSLRSEDTAVYYCAGSYYSYDVLDYWGQGTTVTVSS

SEQ ID NO: 159 - protein, 246 aa, Artificial Sequence
  Description of Artificial Sequence: Synthetic polypeptide
QVQLVQSGAEVKKPGSSVKVSCKASGHDFHLWYIHWVRQAPGQGLEWMGRISPGSGNVKYNEKFKGRVTITADTSTSTAYMELSSLRSEDTAVYYCAGSYYSYDVLDYWGQGTTVTVSSGGGGSGGGGSGGGGSGGGGSDIQMTQSPSFLSASVGDRVTITCKASQNVGDRVAWHQQKPGKAPKALIYSSSHRYKGVPSRFSGSGSGTEFTLTISSLQPEDFATYFCQQFKSYPLTFGQGTKLEIK

SEQ ID NO: 160 - protein, 107 aa, Artificial Sequence
  Description of Artificial Sequence: Synthetic polypeptide
DIQMTQSPSFLSASVGDRVTITCKASQNVGDRVAWHQQKPGKAPKALIYSSSHRYKGVPSRFSGSGSGTEFTLTISSLQPEDFATYFCQQFKSYPLTFGQGTKLEIK

SEQ ID NO: 161 - protein, 119 aa, Artificial Sequence
  Description of Artificial Sequence: Synthetic polypeptide
QVQLVQSGAEVKKPGSSVKVSCKASGHDFHLWYIHWVRQAPGQGLEWMGRISPGSGNVKYNEKFKGRVTITADTSTSTAYMELSSLRSEDTAVYYCAGSYYSYDVLDYWGQGTTVTVSS

SEQ ID NO: 162 - protein, 246 aa, Artificial Sequence
  Description of Artificial Sequence: Synthetic polypeptide
QVQLVQSGAEVKKPGSSVKVSCKASGHDFKLTYIHWVRQAPGQGLEWMGRISAGSGNVKYNEKFKGRVTITADTSTSTAYMELSSLRSEDTAVYYCAGSYYSYDVLDYWGQGTTVTVSSGGGGSGGGGSGGGGSGGGGSDIQMTQSPSFLSASVGDRVTITCKASQNVDDRVAWYQQKPGKAPKALIYSSSHRYKGVPSRFSGSGSGTEFTLTISSLQPEDFATYFCQQFKSYPLTFGQGTKLEIK

SEQ ID NO: 163 - protein, 107 aa, Artificial Sequence; identical to SEQ ID NO: 87
  Description of Artificial Sequence: Synthetic polypeptide

SEQ ID NO: 164 - protein, 119 aa, Artificial Sequence; identical to SEQ ID NO: 91
  Description of Artificial Sequence: Synthetic polypeptide

SEQ ID NO: 165 - protein, 246 aa, Artificial Sequence
  Description of Artificial Sequence: Synthetic polypeptide
QVQLVQSGAEVKKPGSSVKVSCKASGTDFHLWYIHWVRQAPGQGLEWMGRVFAGSGSYRYNEKFKGRVTITADTSTSTAYMELSSLRSEDTAVYYCAGSYYSYDVLDYWGQGTTVTVSSGGGGSGGGGSGGGGSGGGGSDIQMTQSPSFLSASVGDRVTITCKASQNVDDRVAWYQQKPGKAPKALIYSSSHRYKGVPSRFSGSGSGTEFTLTISSLQPEDFATYFCQQFKSYPLTFGQGTKLEIK

SEQ ID NO: 166 - protein, 107 aa, Artificial Sequence; identical to SEQ ID NO: 87
  Description of Artificial Sequence: Synthetic polypeptide

SEQ ID NO: 167 - protein, 119 aa, Artificial Sequence
  Description of Artificial Sequence: Synthetic polypeptide
QVQLVQSGAEVKKPGSSVKVSCKASGTDFHLWYIHWVRQAPGQGLEWMGRVFAGSGSYRYNEKFKGRVTITADTSTSTAYMELSSLRSEDTAVYYCAGSYYSYDVLDYWGQGTTVTVSS

SEQ ID NO: 168 - protein, 246 aa, Artificial Sequence
  Description of Artificial Sequence: Synthetic polypeptide
QVQLVQSGAEVKKPGSSVKVSCKASGTDFDKIYIHWVRQAPGQGLEWMGRISAGSGNTKYNEKFKGRVTITADTSTSTAYMELSSLRSEDTAVYYCAGSYYSYDVLDYWGQGTTVTVSSGGGGSGGGGSGGGGSGGGGSDIQMTQSPSFLSASVGDRVTITCKASQNVADRVAWYQQKPGKAPKALIYSSSHRYKGVPSRFSGSGSGTEFTLTISSLQPEDFATYFCQQFKSYPLTFGQGTKLEIK

SEQ ID NO: 169 - protein, 107 aa, Artificial Sequence; identical to SEQ ID NO: 141
  Description of Artificial Sequence: Synthetic polypeptide

SEQ ID NO: 170 - protein, 119 aa, Artificial Sequence; identical to SEQ ID NO: 115
  Description of Artificial Sequence: Synthetic polypeptide

SEQ ID NO: 171 - protein, 246 aa, Artificial Sequence
  Description of Artificial Sequence: Synthetic polypeptide
QVQLVQSGAEVKKPGSSVKVSCKASGTDFKLTYIHWVRQAPGQGLEWMGRISAGSGNTKYNEKFKGRVTITADTSTSTAYMELSSLRSEDTAVYYCAGSYYSYDVLDYWGQGTTVTVSSGGGGSGGGGSGGGGSGGGGSDIQMTQSPSFLSASVGDRVTITCKASQNVEDRVAWYQQKPGKAPKALIYSSSHRYKGVPSRFSGSGSGTEFTLTISSLQPEDFATYFCQQFKSYPLTFGQGTKLEIK

SEQ ID NO: 172 - protein, 107 aa, Artificial Sequence; identical to SEQ ID NO: 81
  Description of Artificial Sequence: Synthetic polypeptide

SEQ ID NO: 173 - protein, 119 aa, Artificial Sequence
  Description of Artificial Sequence: Synthetic polypeptide
QVQLVQSGAEVKKPGSSVKVSCKASGTDFKLTYIHWVRQAPGQGLEWMGRISAGSGNTKYNEKFKGRVTITADTSTSTAYMELSSLRSEDTAVYYCAGSYYSYDVLDYWGQGTTVTVSS

SEQ ID NO: 174 - protein, 246 aa, Artificial Sequence
  Description of Artificial Sequence: Synthetic polypeptide
QVQLVQSGAEVKKPGSSVKVSCKASGTDFRLTYIHWVRQAPGQGLEWMGRISPGSGNTKYNEKFKGRVTITADTSTSTAYMELSSLRSEDTAVYYCAGSYYSYDVLDYWGQGTTVTVSSGGGGSGGGGSGGGGSGGGGSDIQMTQSPSFLSASVGDRVTITCKASQNVGNRVAWYQQKPGKAPKALIYSSSHRYKGVPSRFSGSGSGTEFTLTISSLQPEDFATYFCQQFKSYPLTFGQGTKLEIK

SEQ ID NO: 175 - protein, 107 aa, Artificial Sequence; identical to SEQ ID NO: 108
  Description of Artificial Sequence: Synthetic polypeptide

SEQ ID NO: 176 - protein, 119 aa, Artificial Sequence
  Description of Artificial Sequence: Synthetic polypeptide
QVQLVQSGAEVKKPGSSVKVSCKASGTDFRLTYIHWVRQAPGQGLEWMGRISPGSGNTKYNEKFKGRVTITADTSTSTAYMELSSLRSEDTAVYYCAGSYYSYDVLDYWGQGTTVTVSS

SEQ ID NO: 177 - protein, 246 aa, Artificial Sequence
  Description of Artificial Sequence: Synthetic polypeptide
QVQLVQSGAEVKKPGSSVKVSCKASGHDFDKTYIHWVRQAPGQGLEWMGRVSAGSGNVKYNEKFKGRVTITADTSTSTAYMELSSLRSEDTAVYYCAGSYYSYDVLDYWGQGTTVTVSSGGGGSGGGGSGGGGSGGGGSDIQMTQSPSFLSASVGDRVTITCKASQNVEDRVAWYQQKPGKAPKALIYSSSHRYKGVPSRFSGSGSGTEFTLTISSLQPEDFATYFCQQFKSYPLTFGQGTKLEIK

SEQ ID NO: 178 - protein, 107 aa, Artificial Sequence; identical to SEQ ID NO: 81
  Description of Artificial Sequence: Synthetic polypeptide

SEQ ID NO: 179 - protein, 119 aa, Artificial Sequence
  Description of Artificial Sequence: Synthetic polypeptide
QVQLVQSGAEVKKPGSSVKVSCKASGHDFDKTYIHWVRQAPGQGLEWMGRVSAGSGNVKYNEKFKGRVTITADTSTSTAYMELSSLRSEDTAVYYCAGSYYSYDVLDYWGQGTTVTVSS

SEQ ID NO: 180 - protein, 246 aa, Artificial Sequence
  Description of Artificial Sequence: Synthetic polypeptide
QVQLVQSGAEVKKPGSSVKVSCKASGHDFKLTYIHWVRQAPGQGLEWMGRVSPGSGNTKYNEKFKGRVTITADTSTSTAYMELSSLRSEDTAVYYCAGSYYSYDVLDYWGQGTTVTVSSGGGGSGGGGSGGGGSGGGGSDIQMTQSPSFLSASVGDRVTITCKASQNVEDRVAWHQQKPGKAPKALIYSSSHRYKGVPSRFSGSGSGTEFTLTISSLQPEDFATYFCQQFKSYPLTFGQGTKLEIK

SEQ ID NO: 181 - protein, 107 aa, Artificial Sequence
  Description of Artificial Sequence: Synthetic polypeptide
DIQMTQSPSFLSASVGDRVTITCKASQNVEDRVAWHQQKPGKAPKALIYSSSHRYKGVPSRFSGSGSGTEFTLTISSLQPEDFATYFCQQFKSYPLTFGQGTKLEIK

SEQ ID NO: 182 - protein, 119 aa, Artificial Sequence
  Description of Artificial Sequence: Synthetic polypeptide
QVQLVQSGAEVKKPGSSVKVSCKASGHDFKLTYIHWVRQAPGQGLEWMGRVSPGSGNTKYNEKFKGRVTITADTSTSTAYMELSSLRSEDTAVYYCAGSYYSYDVLDYWGQGTTVTVSS

SEQ ID NO: 183 - protein, 246 aa, Artificial Sequence
  Description of Artificial Sequence: Synthetic polypeptide
QVQLVQSGAEVKKPGSSVKVSCKASGHDFDKTYIHWVRQAPGQGLEWMGRIYPGSGNVKYNEKFKGRVTITADTSTSTAYMELSSLRSEDTAVYYCAGSYYSYDVLDYWGQGTTVTVSSGGGGSGGGGSGGGGSGGGGSDIQMTQSPSFLSASVGDRVTITCKASQNVADRVAWYQQKPGKAPKALIYSSSHRYKGVPSRFSGSGSGTEFTLTISSLQPEDFATYFCQQFKSYPLTFGQGTKLEIK

SEQ ID NO: 184 - protein, 107 aa, Artificial Sequence; identical to SEQ ID NO: 141
  Description of Artificial Sequence: Synthetic polypeptide

SEQ ID NO: 185 - protein, 119 aa, Artificial Sequence
  Description of Artificial Sequence: Synthetic polypeptide
QVQLVQSGAEVKKPGSSVKVSCKASGHDFDKTYIHWVRQAPGQGLEWMGRIYPGSGNVKYNEKFKGRVTITADTSTSTAYMELSSLRSEDTAVYYCAGSYYSYDVLDYWGQGTTVTVSS

SEQ ID NO: 186 - protein, 246 aa, Artificial Sequence
  Description of Artificial Sequence: Synthetic polypeptide
QVQLVQSGAEVKKPGSSVKVSCKASGTDFDKTYIHWVRQAPGQGLEWMGRISAGSGNVKYNEKFKGRVTITADTSTSTAYMELSSLRSEDTAVYYCAGSYYSYDVLDYWGQGTTVTVSSGGGGSGGGGSGGGGSGGGGSDIQMTQSPSFLSASVGDRVTITCKASQNVDDRVAWYQQKPGKAPKALIYSSSHRYKGVPSRFSGSGSGTEFTLTISSLQPEDFATYFCQQFKSYPLTFGQGTKLEIK

SEQ ID NO: 187 - protein, 107 aa, Artificial Sequence; identical to SEQ ID NO: 87
  Description of Artificial Sequence: Synthetic polypeptide

SEQ ID NO: 188 - protein, 119 aa, Artificial Sequence
  Description of Artificial Sequence: Synthetic polypeptide
QVQLVQSGAEVKKPGSSVKVSCKASGTDFDKTYIHWVRQAPGQGLEWMGRISAGSGNVKYNEKFKGRVTITADTSTSTAYMELSSLRSEDTAVYYCAGSYYSYDVLDYWGQGTTVTVSS

SEQ ID NO: 189 - protein, 246 aa, Artificial Sequence
  Description of Artificial Sequence: Synthetic polypeptide
QVQLVQSGAEVKKPGSSVKVSCKASGTDFDKIYIHWVRQAPGQGLEWMGRISAGSGNIKYNEKFKGRVTITADTSTSTAYMELSSLRSEDTAVYYCAGSYYSYDVLDYWGQGTTVTVSSGGGGSGGGGSGGGGSGGGGSDIQMTQSPSFLSASVGDRVTITCKASQNVDDRVAWYQQKPGKAPKALIYSSSHRYKGVPSRFSGSGSGTEFTLTISSLQPEDFATYFCQQFKSYPLTFGQGTKLEIK

SEQ ID NO: 190 - protein, 107 aa, Artificial Sequence; identical to SEQ ID NO: 87
  Description of Artificial Sequence: Synthetic polypeptide

SEQ ID NO: 191 - protein, 119 aa, Artificial Sequence
  Description of Artificial Sequence: Synthetic polypeptide
QVQLVQSGAEVKKPGSSVKVSCKASGTDFDKIYIHWVRQAPGQGLEWMGRISAGSGNIKYNEKFKGRVTITADTSTSTAYMELSSLRSEDTAVYYCAGSYYSYDVLDYWGQGTTVTVSS

SEQ ID NO: 192 - protein, 246 aa, Artificial Sequence
  Description of Artificial Sequence: Synthetic polypeptide
QVQLVQSGAEVKKPGSSVKVSCKASGTDFDKIYIHWVRQAPGQGLEWMGRISAGSGNVKYNEKFKGRVTITADTSTSTAYMELSSLRSEDTAVYYCAGSYYSYDVLDYWGQGTTVTVSSGGGGSGGGGSGGGGSGGGGSDIQMTQSPSFLSASVGDRVTITCKASQNVGDRVAWYQQKPGKAPKALIYSSSHRYKGVPSRFSGSGSGTEFTLTISSLQPEDFATYFCQQFKSYPLTFGQGTKLEIK

SEQ ID NO: 193 - protein, 107 aa, Artificial Sequence; identical to SEQ ID NO: 102
  Description of Artificial Sequence: Synthetic polypeptide

SEQ ID NO: 194 - protein, 119 aa, Artificial Sequence; identical to SEQ ID NO: 85
  Description of Artificial Sequence: Synthetic polypeptide

SEQ ID NO: 195 - protein, 246 aa, Artificial Sequence
  Description of Artificial Sequence: Synthetic polypeptide
QVQLVQSGAEVKKPGSSVKVSCKASGGTFKLTYIHWVRQAPGQGLEWMGRVSAGSGNVKYNEKFKGRVTITADTSTSTAYMELSSLRSEDTAVYYCAGSYYSYDVLDYWGQGTTVTVSSGGGGSGGGGSGGGGSGGGGSDIQMTQSPSFLSASVGDRVTITCKASQNVDDRVAWYQQKPGKAPKALIYSSSHRYKGVPSRFSGSGSGTEFTLTISSLQPEDFATYFCQQFKSYPLTFGQGTKLEIK

SEQ ID NO: 196 - protein, 107 aa, Artificial Sequence; identical to SEQ ID NO: 87
  Description of Artificial Sequence: Synthetic polypeptide

SEQ ID NO: 197 - protein, 119 aa, Artificial Sequence
  Description of Artificial Sequence: Synthetic polypeptide
QVQLVQSGAEVKKPGSSVKVSCKASGGTFKLTYIHWVRQAPGQGLEWMGRVSAGSGNVKYNEKFKGRVTITADTSTSTAYMELSSLRSEDTAVYYCAGSYYSYDVLDYWGQGTTVTVSS

SEQ ID NO: 198 - protein, 246 aa, Artificial Sequence
  Description of Artificial Sequence: Synthetic polypeptide
QVQLVQSGAEVKKPGSSVKVSCKASGTDFKLTYIHWVRQAPGQGLEWMGRISPGSGNVKYNEKFKGRVTITADTSTSTAYMELSSLRSEDTAVYYCAGSYYSYDVLDYWGQGTTVTVSSGGGGSGGGGSGGGGSGGGGSDIQMTQSPSFLSASVGDRVTITCKASQNVDNRVAWHQQKPGKAPKALIYSSSHRYKGVPSRFSGSGSGTEFTLTISSLQPEDFATYFCQQFKSYPLTFGQGTKLEIK

SEQ ID NO: 199 - protein, 107 aa, Artificial Sequence
  Description of Artificial Sequence: Synthetic polypeptide
DIQMTQSPSFLSASVGDRVTITCKASQNVDNRVAWHQQKPGKAPKALIYSSSHRYKGVPSRFSGSGSGTEFTLTISSLQPEDFATYFCQQFKSYPLTFGQGTKLEIK

SEQ ID NO: 200 - protein, 119 aa, Artificial Sequence
  Description of Artificial Sequence: Synthetic polypeptide
QVQLVQSGAEVKKPGSSVKVSCKASGTDFKLTYIHWVRQAPGQGLEWMGRISPGSGNVKYNEKFKGRVTITADTSTSTAYMELSSLRSEDTAVYYCAGSYYSYDVLDYWGQGTTVTVSS

SEQ ID NO: 201 - protein, 246 aa, Artificial Sequence
  Description of Artificial Sequence: Synthetic polypeptide
QVQLVQSGAEVKKPGSSVKVSCKASGHDFDKFYIHWVRQAPGQGLEWMGRVSAGSGNTKYNEKFKGRVTITADTSTSTAYMELSSLRSEDTAVYYCAGSYYSYDVLDYWGQGTTVTVSSGGGGSGGGGSGGGGSGGGGSDIQMTQSPSFLSASVGDRVTITCKASQNVDNRVAWYQQKPGKAPKALIYSSSHRYKGVPSRFSGSGSGTEFTLTISSLQPEDFATYFCQQFKSYPLTFGQGTKLEIK

SEQ ID NO: 202 - protein, 107 aa, Artificial Sequence; identical to SEQ ID NO: 90
  Description of Artificial Sequence: Synthetic polypeptide

SEQ ID NO: 203 - protein, 119 aa, Artificial Sequence
  Description of Artificial Sequence: Synthetic polypeptide
QVQLVQSGAEVKKPGSSVKVSCKASGHDFDKFYIHWVRQAPGQGLEWMGRVSAGSGNTKYNEKFKGRVTITADTSTSTAYMELSSLRSEDTAVYYCAGSYYSYDVLDYWGQGTTVTVSS

SEQ ID NO: 204 - protein, 246 aa, Artificial Sequence
  Description of Artificial Sequence: Synthetic polypeptide
QVQLVQSGAEVKKPGSSVKVSCKASGTDFDKFYIHWVRQAPGQGLEWMGRVSAGSGNVKYNEKFKGRVTITADTSTSTAYMELSSLRSEDTAVYYCAGSYYSYDVLDYWGQGTTVTVSSGGGGSGGGGSGGGGSGGGGSDIQMTQSPSFLSASVGDRVTITCKASQNVGDRVVWYQQKPGKAPKALIYSSSHRYKGVPSRFSGSGSGTEFTLTISSLQPEDFATYFCQQFKSYPLTFGQGTKLEIK

SEQ ID NO: 205 - protein, 119 aa, Artificial Sequence
  Description of Artificial Sequence: Synthetic polypeptide
QVQLVQSGAEVKKPGSSVKVSCKASGTDFDKFYIHWVRQAPGQGLEWMGRVSAGSGNVKYNEKFKGRVTITADTSTSTAYMELSSLRSEDTAVYYCAGSYYSYDVLDYWGQGTTVTVSS

SEQ ID NO: 206 - protein, 246 aa, Artificial Sequence
  Description of Artificial Sequence: Synthetic polypeptide
QVQLVQSGAEVKKPGSSVKVSCKASGYSFTTYYIHWVRQAPGQGLEWMGWFSAGSGNTKYNEKFKGRVTITADTSTSTAYMELSSLRSEDTAVYYCAVSYYSYDVLDYWGQGTTVTVSSGGGGSGGGGSGGGGSGGGGSDIQMTQSPSFLSASVGDRVTITCKASQNVGINVVWHQQKPGKAPKALIYSSSHRYSGVPSRFSGSGSGTEFTLTISSLQPEDFATYFCQQFKSYPLTFGQGTKLEIK

SEQ ID NO: 207 - protein, 119 aa, Artificial Sequence
  Description of Artificial Sequence: Synthetic polypeptide
QVQLVQSGAEVKKPGSSVKVSCKASGYSFTTYYIHWVRQAPGQGLEWMGWFSAGSGNTKYNEKFKGRVTITADTSTSTAYMELSSLRSEDTAVYYCAVSYYSYDVLDYWGQGTTVTVSS

SEQ ID NO: 208 - protein, 246 aa, Artificial Sequence
  Description of Artificial Sequence: Synthetic polypeptide
QVQLVQSGAEVKKPGSSVKVSCKASGYSFTTYYIHWVRQAPGQGLEWMGWFSAGSGNTKYNEKFKGRVTITADTSTSTAYMELSSLRSEDTAVYYCAGSYYSYDVLDYWGQGTTVTVSSGGGGSGGGGSGGGGSGGGGSDIQMTQSPSFLSASVGDRVTITCKASQNVGINVVWHQQKPGKAPKALIYSSSHRYSGVPSRFSGSGSGTEFTLTISSLQPEDFATYFCQQFKSYPLTFGQGTKLEIK

SEQ ID NO: 209 - protein, 119 aa, Artificial Sequence
  Description of Artificial Sequence: Synthetic polypeptide
QVQLVQSGAEVKKPGSSVKVSCKASGYSFTTYYIHWVRQAPGQGLEWMGWFSAGSGNTKYNEKFKGRVTITADTSTSTAYMELSSLRSEDTAVYYCAGSYYSYDVLDYWGQGTTVTVSS

SEQ ID NO: 210 - protein, 246 aa, Artificial Sequence
  Description of Artificial Sequence: Synthetic polypeptide
QVQLVQSGAEVKKPGSSVKVSCKASGYSFTTYYIHWVRQAPGQGLEWMGWFFPGSGNTKYNEKFKGRVTITADTSTSTAYMELSSLRSEDTAVYYCAGSYYSYDVLDYWGQGTTVTVSSGGGGSGGGGSGGGGSGGGGSDIQMTQSPSFLSASVGDRVTITCKASQNVGINVVWHQQKPGKAPKALIYSSSHRYSGVPSRFSGSGSGTEFTLTISSLQPEDFATYFCQQFKSYPLTFGQGTKLEIK

SEQ ID NO: 211 - protein, 119 aa, Artificial Sequence
  Description of Artificial Sequence: Synthetic polypeptide
QVQLVQSGAEVKKPGSSVKVSCKASGYSFTTYYIHWVRQAPGQGLEWMGWFFPGSGNTKYNEKFKGRVTITADTSTSTAYMELSSLRSEDTAVYYCAGSYYSYDVLDYWGQGTTVTVSS

SEQ ID NO: 212 - protein, 246 aa, Artificial Sequence
  Description of Artificial Sequence: Synthetic polypeptide
QVQLVQSGAEVKKPGSSVKVSCKASGYSFTTYYIHWVRQAPGQGLEWMGWFSPGSGNTKYNEKFKGRVTITADTSTSTAYMELSSLRSEDTAVYYCAVSYYSYDVLDYWGQGTTVTVSSGGGGSGGGGSGGGGSGGGGSDIQMTQSPSFLSASVGDRVTITCKASQNVGINVVWHQQKPGKAPKALIYSSSHRYSGVPSRFSGSGSGTEFTLTISSLQPEDFATYFCQQFKSYPLTFGQGTKLEIK

SEQ ID NO: 213 - protein, 119 aa, Artificial Sequence
  Description of Artificial Sequence: Synthetic polypeptide
QVQLVQSGAEVKKPGSSVKVSCKASGYSFTTYYIHWVRQAPGQGLEWMGWFSPGSGNTKYNEKFKGRVTITADTSTSTAYMELSSLRSEDTAVYYCAVSYYSYDVLDYWGQGTTVTVSS

SEQ ID NO: 214 - protein, 246 aa, Artificial Sequence
  Description of Artificial Sequence: Synthetic polypeptide
QVQLVQSGAEVKKPGSSVKVSCKASGYSFTTYYIHWVRQAPGQGLEWMGWFSPGSGNTKYNEKFKGRVTITADTSTSTAYMELSSLRSEDTAVYYCAGSYYSYDVLDYWGQGTTVTVSSGGGGSGGGGSGGGGSGGGGSDIQMTQSPSFLSASVGDRVTITCKASQNVGINVVWHQQKPGKAPKALIYSSSHRYSGVPSRFSGSGSGTEFTLTISSLQPEDFATYFCQQFKSYPLTFGQGTKLEIK

SEQ ID NO: 215 - protein, 119 aa, Artificial Sequence
  Description of Artificial Sequence: Synthetic polypeptide
QVQLVQSGAEVKKPGSSVKVSCKASGYSFTTYYIHWVRQAPGQGLEWMGWFSPGSGNTKYNEKFKGRVTITADTSTSTAYMELSSLRSEDTAVYYCAGSYYSYDVLDYWGQGTTVTVSS

SEQ ID NO: 216 - protein, 246 aa, Artificial Sequence
  Description of Artificial Sequence: Synthetic polypeptide
QVQLVQSGAEVKKPGSSVKVSCKASGYSFTTYYIHWVRQAPGQGLEWMGRIFPGSGNIKYNEKFKGRVTITADTSTSTAYMELSSLRSEDTAVYYCAGSYYSYDVLDYWGQGTTVTVSSGGGGSGGGGSGGGGSGGGGSDIQMTQSPSFLSASVGDRVTITCKASQNVGINVVWHQQKPGKAPKALIYSSSHRYSGVPSRFSGSGSGTEFTLTISSLQPEDFATYFCQQFKSYPLTFGQGTKLEIK

SEQ ID NO: 217 - protein, 119 aa, Artificial Sequence
  Description of Artificial Sequence: Synthetic polypeptide
QVQLVQSGAEVKKPGSSVKVSCKASGYSFTTYYIHWVRQAPGQGLEWMGRIFPGSGNIKYNEKFKGRVTITADTSTSTAYMELSSLRSEDTAVYYCAGSYYSYDVLDYWGQGTTVTVSS

SEQ ID NO: 218 - protein, 246 aa, Artificial Sequence
  Description of Artificial Sequence: Synthetic polypeptide
QVQLVQSGAEVKKPGSSVKVSCKASGYSFTTYYIHWVRQAPGQGLEWMGWFFPGSGNIKYNEKFKGRVTITADTSTSTAYMELSSLRSEDTAVYYCAGSIYSAGVLDYWGQGTTVTVSSGGGGSGGGGSGGGGSGGGGSDIQMTQSPSFLSASVGDRVTITCKASQNVGINVVWHQQKPGKAPKALIYSSSHRYSGVPSRFSGSGSGTEFTLTISSLQPEDFATYFCQQFKSYPLTFGQGTKLEIK

SEQ ID NO: 219 - protein, 119 aa, Artificial Sequence
  Description of Artificial Sequence: Synthetic polypeptide
QVQLVQSGAEVKKPGSSVKVSCKASGYSFTTYYIHWVRQAPGQGLEWMGWFFPGSGNIKYNEKFKGRVTITADTSTSTAYMELSSLRSEDTAVYYCAGSIYSAGVLDYWGQGTTVTVSS

SEQ ID NO: 220 - protein, 246 aa, Artificial Sequence
  Description of Artificial Sequence: Synthetic polypeptide
QVQLVQSGAEVKKPGSSVKVSCKASGYSFTLGYIHWVRQAPGQGLEWMGWFFPGSGNIKYNEKFKGRVTITADTSTSTAYMELSSLRSEDTAVYYCAGSYYSYDVLDYWGQGTTVTVSSGGGGSGGGGSGGGGSGGGGSDIQMTQSPSFLSASVGDRVTITCKASQNVGINVVWHQQKPGKAPKALIYSSSHRYSGVPSRFSGSGSGTEFTLTISSLQPEDFATYFCQQFKSYPLTFGQGTKLEIK

SEQ ID NO: 221 - protein, 119 aa, Artificial Sequence
  Description of Artificial Sequence: Synthetic polypeptide
QVQLVQSGAEVKKPGSSVKVSCKASGYSFTLGYIHWVRQAPGQGLEWMGWFFPGSGNIKYNEKFKGRVTITADTSTSTAYMELSSLRSEDTAVYYCAGSYYSYDVLDYWGQGTTVTVSS

SEQ ID NO: 222 - protein, 246 aa, Artificial Sequence
  Description of Artificial Sequence: Synthetic polypeptide
QVQLVQSGAEVKKPGSSVKVSCKASGYSFRLTYIHWVRQAPGQGLEWMGWFFPGSGNIKYNEKFKGRVTITADTSTSTAYMELSSLRSEDTAVYYCAGSYYSYDVLDYWGQGTTVTVSSGGGGSGGGGSGGGGSGGGGSDIQMTQSPSFLSASVGDRVTITCKASQNVGINVVWHQQKPGKAPKALIYSSSHRYSGVPSRFSGSGSGTEFTLTISSLQPEDFATYFCQQFKSYPLTFGQGTKLEIK

SEQ ID NO: 223 - protein, 119 aa, Artificial Sequence
  Description of Artificial Sequence: Synthetic polypeptide
QVQLVQSGAEVKKPGSSVKVSCKASGYSFRLTYIHWVRQAPGQGLEWMGWFFPGSGNIKYNEKFKGRVTITADTSTSTAYMELSSLRSEDTAVYYCAGSYYSYDVLDYWGQGTTVTVSS

SEQ ID NO: 224 - protein, 246 aa, Artificial Sequence
  Description of Artificial Sequence: Synthetic polypeptide
QVQLVQSGAEVKKPGSSVKVSCKASGYSFHNWYIHWVRQAPGQGLEWMGWFFPGSGNIKYNEKFKGRVTITADTSTSTAYMELSSLRSEDTAVYYCAGSYYSYDVLDYWGQGTTVTVSSGGGGSGGGGSGGGGSGGGGSDIQMTQSPSFLSASVGDRVTITCKASQNVGINVVWHQQKPGKAPKALIYSSSHRYSGVPSRFSGSGSGTEFTLTISSLQPEDFATYFCQQFKSYPLTFGQGTKLEIK

SEQ ID NO: 225 - protein, 119 aa, Artificial Sequence
  Description of Artificial Sequence: Synthetic polypeptide
QVQLVQSGAEVKKPGSSVKVSCKASGYSFHNWYIHWVRQAPGQGLEWMGWFFPGSGNIKYNEKFKGRVTITADTSTSTAYMELSSLRSEDTAVYYCAGSYYSYDVLDYWGQGTTVTVSS

SEQ ID NO: 226-229 - skipped (4 entries)

SEQ ID NO: 230 - protein, 107 aa, Artificial Sequence
  Description of Artificial Sequence: Synthetic polypeptide
  MOD_RES (30)..(30): G, E, A or D
  MOD_RES (31)..(31): N or D
  MOD_RES (32)..(32): R or K
  MOD_RES (36)..(36): Y or H
  MOD_RES (56)..(56): K or S
DIQMTQSPSFLSASVGDRVTITCKASQNVXXXVAWXQQKPGKAPKALIYSSSHRYXGVPSRFSGSGSGTEFTLTISSLQPEDFATYFCQQFKSYPLTFGQGTKLEIK

SEQ ID NO: 231 - protein, 119 aa, Artificial Sequence
  Description of Artificial Sequence: Synthetic polypeptide
  MOD_RES (27)..(27): H, T, G or Y
  MOD_RES (28)..(28): D, T or S
  MOD_RES (30)..(30): H, R, D, K or T
  MOD_RES (31)..(31): L, D, K, T or N
  MOD_RES (32)..(32): W, F, T, I, Y or G
  MOD_RES (50)..(50): R or W
  MOD_RES (51)..(51): V, I or F
  MOD_RES (52)..(52): F, S or Y
  MOD_RES (53)..(53): A or P
  MOD_RES (57)..(57): N or S
  MOD_RES (58)..(58): T, V, Y or I
  MOD_RES (59)..(59): K or R
  MOD_RES (98)..(98): G or V
  MOD_RES (100)..(100): Y or I
  MOD_RES (103)..(103): Y or A
  MOD_RES (104)..(104): D or G
QVQLVQSGAEVKKPGSSVKVSCKASGXXFXXXYIHWVRQAPGQGLEWMGXXXXGSGXXXYNEKFKGRVTITADTSTSTAYMELSSLRSEDTAVYYCAXSXYSXXVLDYWGQGTTVTVSS

SEQ ID NO: 232 - protein, 107 aa, Artificial Sequence
  Description of Artificial Sequence: Synthetic polypeptide
DIQMTQTTSSLSASLGDRVTISCSASQGISNYLNWYQQKPDGTVKLLIYYTSSLHSGVPSRFSGSGSGTDYSLTISNLEPEDIATYYCQQYSKLPRTFGGGTKVEIK

SEQ ID NO: 233 - protein, 120 aa, Artificial Sequence
  Description of Artificial Sequence: Synthetic polypeptide
QVQLKESGPGLVAPSQSLSITCTVSGFSLTAYGVNWVRQPPGKGLEWLGMIWGDGNTDYNSALKSRLSISKDNSKSQVFLKMNSLQTDDTARYYCARDRVTATLYAMDYWGQGTSVTVSS

SEQ ID NO: 234-1003 - skipped (770 entries)

SEQ ID NO: 1004 - protein, 721 aa, Artificial Sequence
  Description of Artificial Sequence: Synthetic polypeptide
METDTLLLWVLLLWVPGSTGQVQLVQSGAEVKKPGSSVKVSCKASGYSFTTYYIHWVRQAPGQGLEWMGWFFPGSGNIKYNEKFKGRVTITADTSTSTAYMELSSLRSEDTAVYYCAGSYYSYDVLDYWGQGTTVTVSSGGGGSGGGGSGGGGSGGGGSDIQMTQSPSFLSASVGDRVTITCKASQNVGINVVWHQQKPGKAPKALIYSSSHRYSGVPSRFSGSGSGTEFTLTISSLQPEDFATYFCQQFKSYPLTFGQGTKLEIKGGGGSQVTLRESGPALVKPTQTLTLTCTFSGFSLSTSGMGVGWIRQPPGKALEWLAHIWWDDDKRYNPALKSRLTISKDTSKNQVFLTMTNMDPVDTATYYCARMELWSYYFDYWGQGTTVTVSSASTKGPSVFPLAPSSKSTSGGTAALGCLVKDYFPEPVTVSWNSGALTSGVHTFPAVLQSSGLYSLSSVVTVPSSSLGTQTYICNVNHKPSNTKVDKKVEPKSCDKTHTCPPCPAPELLGGPSVFLFPPKPKDTLMISRTPEVTCVVVDVSHEDPEVKFNWYVDGVEVHNAKTKPREEQYASTYRVVSVLTVLHQDWLNGKEYKCKVSNKALPAPIEKTISKAKGQPREPQVYTLPPSREEMTKNQVSLTCLVKGFYPSDIAVEWESNGQPENNYKTTPPVLDSDGSFFLYSKLTVDKSRWQQGNVFSCSVMHEALHNHYTQKSLSLSPGK

SEQ ID NO: 1005 - protein, 233 aa, Artificial Sequence
  Description of Artificial Sequence: Synthetic polypeptide
METPAQLLFLLLLWLPDTTGENVLTQSPATLSLSPGERATLSCSASSSVSYMHWYQQKPGQAPRLLIYDTSKLASGIPARFSGSGSGTDHTLTISSLEPEDFAVYYCFQGSVYPFTFGQGTKLEIKRTVAAPSVFIFPPSDEQLKSGTASVVCLLNNFYPREAKVQWKVDNALQSGNSQESVTEQDSKDSTYSLSSTLTLSKADYEKHKVYACEVTHQGLSSPVTKSFNRGEC

SEQ ID NO: 1006 - protein, 721 aa, Artificial Sequence
  Description of Artificial Sequence: Synthetic polypeptide
METDTLLLWVLLLWVPGSTGQVQLVQSGAEVKKPGSSVKVSCKASGYSFTTYYIHWVRQAPGQGLEWMGWFFPGSGNIKYNEKFKGRVTITADTSTSTAYMELSSLRSEDTAVYYCAGSYYSYDVLDYWGQGTTVTVSSGGGGSGGGGSGGGGSGGGGSDIQMTQSPSFLSASVGDRVTITCKASQNVGINVVWHQQKPGKAPKALIYSSSHRYSGVPSRFSGSGSGTEFTLTISSLQPEDFATYFCQQFKSYPLTFGQGTKLEIKGGGGSQVQLVESGGGVVQPGRSLRLSCAASGIDFSRYWMSWVRQAPGKGLEWVGEINPDSSTINYAPSLKDRFTISRDNSKNTLYLQMSSLRAEDTAVYYCASLYYDYGDAMDYWGQGTTVTVSSASTKGPSVFPLAPSSKSTSGGTAALGCLVKDYFPEPVTVSWNSGALTSGVHTFPAVLQSSGLYSLSSVVTVPSSSLGTQTYICNVNHKPSNTKVDKKVEPKSCDKTHTCPPCPAPELLGGPSVFLFPPKPKDTLMISRTPEVTCVVVDVSHEDPEVKFNWYVDGVEVHNAKTKPREEQYASTYRVVSVLTVLHQDWLNGKEYKCKVSNKALPAPIEKTISKAKGQPREPQVYTLPPSREEMTKNQVSLTCLVKGFYPSDIAVEWESNGQPENNYKTTPPVLDSDGSFFLYSKLTVDKSRWQQGNVFSCSVMHEALHNRFTQKSLSLSPGK

SEQ ID NO: 1007 - protein, 234 aa, Artificial Sequence
  Description of Artificial Sequence: Synthetic polypeptide
METDTLLLWVLLLWVPGSTGDIQMTQSPSSLSASVGDRVTITCKASQSVDSNVAWYQQKPEKAPKALIFSASLRFSGVPSRFSGSGSGTDFTLTISSLQPEDFATYFCQQYNNYPLTFGQGTKLEIKRTVAAPSVFIFPPSDEQLKSGTASVVCLLNNFYPREAKVQWKVDNALQSGNSQESVTEQDSKDSTYSLSSTLTLSKADYEKHKVYACEVTHQGLSSPVTKSFNRGEC

SEQ ID NO: 1008-1099 - skipped (92 entries)

SEQ ID NO: 1100 - protein, 119 aa, Artificial Sequence; identical to SEQ ID NO: 9
  Description of Artificial Sequence: Synthetic polypeptide

SEQ ID NO: 1101 - protein, 106 aa, Artificial Sequence
  Description of Artificial Sequence: Synthetic polypeptide
QSVLTQPPSVSEAPRQRVTISCKASQNVGINVVWHQQLPGKAPKALIYSSSHRYSGVSDRFSGSGSGTSFSLAISGLQSEDEADYFCQQFKSYPLTFGTGTKVTVL

SEQ ID NO: 1102 - protein, 5 aa, Artificial Sequence
  Description of Artificial Sequence: Synthetic peptide
SAYMH

SEQ ID NO: 1103 - protein, 17 aa, Artificial Sequence
  Description of Artificial Sequence: Synthetic peptide
RIDPATGKTKYAPKFQA

SEQ ID NO: 1104 - protein, 10 aa, Artificial Sequence
  Description of Artificial Sequence: Synthetic peptide
SLNWDYGLDY

SEQ ID NO: 1105 - protein, 7 aa, Artificial Sequence
  Description of Artificial Sequence: Synthetic peptide
GFNIKSA

SEQ ID NO: 1106 - protein, 6 aa, Artificial Sequence
  Description of Artificial Sequence: Synthetic peptide
DPATGK

SEQ ID NO: 1107 - protein, 15 aa, Artificial Sequence
  Description of Artificial Sequence: Synthetic peptide
RASKSVSILGTHLIH

SEQ ID NO: 1108 - protein, 7 aa, Artificial Sequence
  Description of Artificial Sequence: Synthetic peptide
AASNLES

SEQ ID NO: 1109 - protein, 9 aa, Artificial Sequence
  Description of Artificial Sequence: Synthetic peptide
QQSIEDPWT

SEQ ID NO: 1110 - protein, 11 aa, Artificial Sequence
  Description of Artificial Sequence: Synthetic peptide
SKSVSILGTHL

SEQ ID NO: 1111 - protein, 111 aa, Artificial Sequence
  Description of Artificial Sequence: Synthetic polypeptide
DIVLTQSPASLAVSLGQRATISCRASKSVSILGTHLIHWYQQKPGQPPKLLIYAASNLESGVPARFSGSGSETVFTLNIHPVEEEDAATYFCQQSIEDPWTFGGGTKLGIK

SEQ ID NO: 1112 - protein, 119 aa, Artificial Sequence
  Description of Artificial Sequence: Synthetic polypeptide
EVQLQQSVADLVRPGASLKLSCTASGFNIKSAYMHWVIQRPDQGPECLGRIDPATGKTKYAPKFQAKATITADTSSNTAYLQLSSLTSEDTAIYYCTRSLNWDYGLDYWGQGTSVTVSS

SEQ ID NO: 1113 - protein, 119 aa, Artificial Sequence
  Description of Artificial Sequence: Synthetic polypeptide
QVQLVQSGAEVKKPGASVKVSCKASGFNIKSAYMHWVRQAPGQGLEWMGRIDPATGKTKYAPKFQARVTMTADTSTNTAYMELSSLRSEDTAVYYCARSLNWDYGLDYWGQGTLVTVSS

SEQ ID NO: 1114 - protein, 119 aa, Artificial Sequence
  Description of Artificial Sequence: Synthetic polypeptide
QVQLVQSGAEVKKPGASVKVSCKASGFNIKSAYMHWVRQAPGQEPGCMGRIDPATGKTKYAPKFQARVTMTADTSINTAYTELSSLRSEDTATYYCARSLNWDYGLDYWGQGTLVTVSS

SEQ ID NO: 1115 - protein, 119 aa, Artificial Sequence
  Description of Artificial Sequence: Synthetic polypeptide
QVQLVQSGAEVKKPGSSVKVSCKASGFNIKSAYMHWVRQAPGQGLEWMGRIDPATGKTKYAPKFQARVTITADTSTNTAYMELSSLRSEDTAVYYCARSLNWDYGLDYWGQGTLVTVSS

SEQ ID NO: 1116 - protein, 119 aa, Artificial Sequence
  Description of Artificial Sequence: Synthetic polypeptide
QVQLVQSGAEVKKPGASVKVSCKASGFNIKSAYMHWVRQAPGQRLEWMGRIDPATGKTKYAPKFQARVTITADTSANTAYMELSSLRSEDTAVYYCARSLNWDYGLDYWGQGTLVTVSS

SEQ ID NO: 1117 - protein, 109 aa, Artificial Sequence
  Description of Artificial Sequence: Synthetic polypeptide
EIVLTQSPATLSLSPGERATLSCRASKSVSILGTHLIHWYQQKPGQAPRLLIYAASNLESGIPARFSGSGSETDFTLTISSLEPEDFAVYFCQQSIEDPFGGGTKVEIK

SEQ ID NO: 1118 - protein, 109 aa, Artificial Sequence
  Description of Artificial Sequence: Synthetic polypeptide
EIVLTQSPATLSLSPGERATLSCRASKSVSILGTHLIHWYQQKPGLAPRLLIYAASNLESGIPDRFSGSGSETDFTLTISRLEPEDFAVYFCQQSIEDPFGGGTKVEIK

SEQ ID NO: 1119 - protein, 109 aa, Artificial Sequence
  Description of Artificial Sequence: Synthetic polypeptide
EIVLTQSPGTLSLSPGERATLSCRASKSVSILGTHLIHWYQQKPGQAPRLLIYAASNLESGIPDRFSGSGSETDFTLTISRLEPEDFAVYFCQQSIEDPFGGGTKVEIK

SEQ ID NO: 1120 - protein, 5 aa, Artificial Sequence
  Description of Artificial Sequence: Synthetic peptide
DTYMY

SEQ ID NO: 1121 - protein, 17 aa, Artificial Sequence
  Description of Artificial Sequence: Synthetic peptide
RIDPANGNTKYDPKFQD

SEQ ID NO: 1122 - protein, 9 aa, Artificial Sequence
  Description of Artificial Sequence: Synthetic peptide
GSYYYAMDY

SEQ ID NO: 1123 - protein, 7 aa, Artificial Sequence
  Description of Artificial Sequence: Synthetic peptide
GFKTEDT

SEQ ID NO: 1124 - protein, 6 aa, Artificial Sequence
  Description of Artificial Sequence: Synthetic peptide
DPANGN

SEQ ID NO: 1125 - protein, 10 aa, Artificial Sequence
  Description of Artificial Sequence: Synthetic peptide
GFKTEDTYMY

SEQ ID NO: 1126 - protein, 15 aa, Artificial Sequence
  Description of Artificial Sequence: Synthetic peptide
RASESVDSYGNSFMH

SEQ ID NO: 1127 - protein, 7 aa, Artificial Sequence
  Description of Artificial Sequence: Synthetic peptide
RASNLES

SEQ ID NO: 1128 - protein, 9 aa, Artificial Sequence
  Description of Artificial Sequence: Synthetic peptide
QQSNEDPYT

SEQ ID NO: 1129 - protein, 111 aa, Artificial Sequence
  Description of Artificial Sequence: Synthetic polypeptide
DIVLTQSPASLAVSLGQRATISCRASESVDSYGNSFMHWYQQKPGQPPKLLIYRASNLESGIPARFSGSGSRTDFTLTINPVEADDVATYYCQQSNEDPYTFGGGTKLEIK

SEQ ID NO: 1130 - protein, 118 aa, Artificial Sequence
  Description of Artificial Sequence: Synthetic polypeptide
EVQLQQSGAELVKPGASVKLSCTASGFKTEDTYMYWVKQRPEQGLEWIGRIDPANGNTKYDPKFQDKATITADSSSNTAYLQLSSLPSEDTAVYYCARGSYYYAMDYWGQGTSVTVSS

SEQ ID NO: 1131 - protein, 118 aa, Artificial Sequence
  Description of Artificial Sequence: Synthetic polypeptide
QVQLVQSGAEVKKPGSSVKVSCKASGFKTEDTYMYWVRQAPGQGLEWIGRIDPANGNTKYDPKFQDRATITADSSTNTAYMELSSLRSEDTAVYYCARGSYYYAMDYWGQGTLVTVSS

SEQ ID NO: 1132 - protein, 118 aa, Artificial Sequence
  Description of Artificial Sequence: Synthetic polypeptide
QVQLVQSGAEVKKPGASVKVSCKASGFKTEDTYMYWVRQAPGQRLEWIGRIDPANGNTKYDPKFQDRATITADSSANTAYMELSSLRSEDTAVYYCARGSYYYAMDYWGQGTLVTVSS

SEQ ID NO: 1133 - protein, 118 aa, Artificial Sequence
  Description of Artificial Sequence: Synthetic polypeptide
EVQLVESGGGLVQPGGSLKLSCAASGFKTEDTYMYWVRQASGKGLEWIGRIDPANGNTKYDPKFQDRATISADSSKNTAYLQMNSLKTEDTAVYYCARGSYYYAMDYWGQGTLVTVSS

SEQ ID NO: 1134 - protein, 118 aa, Artificial Sequence
  Description of Artificial Sequence: Synthetic polypeptide
EVQLVQSGAEVKKPGESLRISCKASGFKTEDTYMYWVRQMPGKGLEWIGRIDPANGNTKYDPKFQDQATISADSSINTAYLQWSSLKASDTAMYYCARGSYYYAMDYWGQGTLVTVSS

SEQ ID NO: 1135 - protein, 118 aa, Artificial Sequence
  Description of Artificial Sequence: Synthetic polypeptide
QVQLVQSGSELKKPGASVKVSCKASGFKTEDTYMYWVRQAPGQGLEWIGRIDPANGNTKYDPKFQDRAVISADSSVNTAYLQISSLKAEDTAVYYCARGSYYYAMDYWGQGTLVTVSS

SEQ ID NO: 1136 - protein, 111 aa, Artificial Sequence
  Description of Artificial Sequence: Synthetic polypeptide
DIVLTQSPDSLAVSLGERATINCRASESVDSYGNSFMHWYQQKPGQPPKLLIYRASNLESGVPDRFSGSGSRTDFTLTISSLQAEDVAVYYCQQSNEDPYTFGQGTKLEIK

SEQ ID NO: 1137 - protein, 111 aa, Artificial Sequence
  Description of Artificial Sequence: Synthetic polypeptide
EIVLTQSPATLSLSPGERATLSCRASESVDSYGNSFMHWYQQKPGQAPKLLIYRASNLESGIPARFSGSGSRTDFTLTISRLEPEDFAVYYCQQSNEDPYTFGQGTKLEIK

SEQ ID NO: 1138 - protein, 111 aa, Artificial Sequence
  Description of Artificial Sequence: Synthetic polypeptide
DIQLTQSPSSLSASVGDRVTITCRASESVDSYGNSFMHWYQQKPGQAPKLLIYRASNLESGVPSRFSGSGSRTDFTLTISSLQPEDVATYYCQQSNEDPYTFGQGTKLEIK

SEQ ID NO: 1139 - protein, 111 aa, Artificial Sequence
  Description of Artificial Sequence: Synthetic polypeptide
AIQLTQSPSSLSASVGDRVTITCRASESVDSYGNSFMHWYQQKPGKAPKLLIYRASNLESGVPSRFSGSGSRTDFTLTISSLQPEDFATYYCQQSNEDPYTFGQGTKLEIK

SEQ ID NO: 1140 - protein, 111 aa, Artificial Sequence
  Description of Artificial Sequence: Synthetic polypeptide
EIVLTQSPDFQSVTPKEKVTITCRASESVDSYGNSFMHWYQQKPDQSPKLLIYRASNLESGVPSRFSGSGSRTDFTLTINSLEAEDAATYYCQQSNEDPYTFGQGTKLEIK

SEQ ID NO: 1141 - protein, 5 aa, Artificial Sequence
  Description of Artificial Sequence: Synthetic peptide
SYAMS

SEQ ID NO: 1142 - protein, 17 aa, Artificial Sequence
  Description of Artificial Sequence: Synthetic peptide
HISNGGDYIYYADTVKG

SEQ ID NO: 1143 - protein, 12 aa, Artificial Sequence
  Description of Artificial Sequence: Synthetic peptide
PSYYSDPWFFDV

SEQ ID NO: 1144 - protein, 7 aa, Artificial Sequence
  Description of Artificial Sequence: Synthetic peptide
GFTFRSY

SEQ ID NO: 1145 - protein, 6 aa, Artificial Sequence
  Description of Artificial Sequence: Synthetic peptide
SNGGDY

SEQ ID NO: 1146 - protein, 10 aa, Artificial Sequence
  Description of Artificial Sequence: Synthetic peptide
GFTFRSYAMS

SEQ ID NO: 1147 - protein, 10 aa, Artificial Sequence
  Description of Artificial Sequence: Synthetic peptide
SAGSSVSFMH

SEQ ID NO: 1148 - protein, 7 aa, Artificial Sequence
  Description of Artificial Sequence: Synthetic peptide
DTSKLAS

SEQ ID NO: 1149 - protein, 9 aa, Artificial Sequence
  Description of Artificial Sequence: Synthetic peptide
LQGSGFPLT

SEQ ID NO: 1150 - protein, 6 aa, Artificial Sequence
  Description of Artificial Sequence: Synthetic peptide
GSSVSF

SEQ ID NO: 1151 - protein, 106 aa, Artificial Sequence
  Description of Artificial Sequence: Synthetic polypeptide
ENVLTQSPAIMSASPGEKVTMTCSAGSSVSFMHWYQQKSSTSPKLWIYDTSKLASGVPGRFSGSGSGNSFSLTISSMEAEDVAIYYCLQGSGFPLTFGSGTKLEIK

SEQ ID NO: 1152 - protein, 121 aa, Artificial Sequence
  Description of Artificial Sequence: Synthetic polypeptide
DVKLVESGEGLVKPGGSLKLSCAASGFTFRSYAMSWVRQTPEKRLEWVAHISNGGDYIYYADTVKGRFTISRDNARNTLYLQMSSLKSEDTAMYYCTRPSYYSDPWFFDVWGTGTTVTVSS

SEQ ID NO: 1153 - protein, 121 aa, Artificial Sequence
  Description of Artificial Sequence: Synthetic polypeptide
EVQLVESGGGLVQPGGSLRLSCAASGFTFRSYAMSWVRQAPGKGLEWVAHISNGGDYIYYADTVKGRFTISRDNAKNSLYLQMNSLRAEDTAVYYCTRPSYYSDPWFFDVWGQGTTVTVSS

SEQ ID NO: 1154 - protein, 121 aa, Artificial Sequence
  Description of Artificial Sequence: Synthetic polypeptide
QVQLVESGGGVVQPGRSLRLSCAASGFTFRSYAMSWVRQAPGKGLEWVAHISNGGDYIYYADTVKGRFTISRDNSKNTLYLQMSSLRAEDTAVYYCTRPSYYSDPWFFDVWGQGTTVTVSS

SEQ ID NO: 1155 - protein, 121 aa, Artificial Sequence
  Description of Artificial Sequence: Synthetic polypeptide
EVQLVESGGGLVQPGGSLRLSCAASGFTFRSYAMSWVRQAPGKGLEWVAHISNGGDYIYYADTVKGRFTISRDNSKNTLYLQMNSLRAEDTAVYYCTRPSYYSDPWFFDVWGQGTTVTVSS

SEQ ID NO: 1156 - protein, 121 aa, Artificial Sequence
  Description of Artificial Sequence: Synthetic polypeptide
QVQLVQSGSELKKPGASVKVSCKASGFTFRSYAMSWVRQAPGQGLEWVAHISNGGDYIYYADTVKGRFVISRDNSVNTLYLQISSLKAEDTAVYYCTRPSYYSDPWFFDVWGQGTTVTVSS

SEQ ID NO: 1157 - protein, 121 aa, Artificial Sequence
  Description of Artificial Sequence: Synthetic polypeptide
QVQLVQSGAEVKKPGASVKVSCKASGFTFRSYAMSWVRQAPGQRLEWVAHISNGGDYIYYADTVKGRFTITRDNSANTLYMELSSLRSEDTAVYYCTRPSYYSDPWFFDVWGQGTTVTVSS

SEQ ID NO: 1158 - protein, 106 aa, Artificial Sequence
  Description of Artificial Sequence: Synthetic polypeptide
ENVLTQSPATLSLSPGERATLSCSAGSSVSFMHWYQQKPGQAPKLLIYDTSKLASGIPARFSGSGSGNDFTLTISSLEPEDFAVYYCLQGSGFPLTFGQGTKLEIK

SEQ ID NO: 1159 - protein, 106 aa, Artificial Sequence
  Description of Artificial Sequence: Synthetic polypeptide
ENVLTQSPDFQSVTPKEKVTITCSAGSSVSFMHWYQQKPDQSPKLLIYDTSKLASGVPSRFSGSGSGNDFTLTINSLEAEDAATYYCLQGSGFPLTFGQGTKLEIK

SEQ ID NO: 1160 - protein, 106 aa, Artificial Sequence
  Description of Artificial Sequence: Synthetic polypeptide
DNQLTQSPSSLSASVGDRVTITCSAGSSVSFMHWYQQKPGKVPKLLIYDTSKLASGVPSRFSGSGSGNDFTLTISSLQPEDVATYYCLQGSGFPLTFGQGTKLEIK

SEQ ID NO: 1161 - protein, 106 aa, Artificial Sequence
  Description of Artificial Sequence: Synthetic polypeptide
ANQLTQSPSSLSASVGDRVTITCSAGSSVSFMHWYQQKPGKAPKLLIYDTSKLASGVPSRFSGSGSGNDFTLTISSLQPEDFATYYCLQGSGFPLTFGQGTKLEIK

SEQ ID NO: 1162 - protein, 106 aa, Artificial Sequence
  Description of Artificial Sequence: Synthetic polypeptide
DNVLTQSPDSLAVSLGERATINCSAGSSVSFMHWYQQKPGQPPKLLIYDTSKLASGVPDRFSGSGSGNDFTLTISSLQAEDVAVYYCLQGSGFPLTFGQGTKLEIK

SEQ ID NO: 1163 - protein, 5 aa, Artificial Sequence
  Description of Artificial Sequence: Synthetic peptide
DYNIH

SEQ ID NO: 1164 - protein, 17 aa, Artificial Sequence
  Description of Artificial Sequence: Synthetic peptide
YINPYNGRTGYNQKFKA

SEQ ID NO: 1165 - protein, 9 aa, Artificial Sequence
  Description of Artificial Sequence: Synthetic peptide
WDGSSYFDY

SEQ ID NO: 1166 - protein, 10 aa, Artificial Sequence
  Description of Artificial Sequence: Synthetic peptide
GYTFTDYNIH

SEQ ID NO: 1167 - protein, 6 aa, Artificial Sequence
  Description of Artificial Sequence: Synthetic peptide
NPYNGR

SEQ ID NO: 1168 - protein, 10 aa, Artificial Sequence
  Description of Artificial Sequence: Synthetic peptide
SASSSVSYMH

SEQ ID NO: 1169 - protein, 7 aa, Artificial Sequence
  Description of Artificial Sequence: Synthetic peptide
EISKLAS

SEQ ID NO: 1170 - protein, 9 aa, Artificial Sequence
  Description of Artificial Sequence: Synthetic peptide
QQWNYPLLT

SEQ ID NO: 1171 - protein, 106 aa, Artificial Sequence
  Description of Artificial Sequence: Synthetic polypeptide
EIVLTQSPAITAASLGQKVTITCSASSSVSYMHWYQQKSGTSPKPWIYEISKLASGVPARFSGSGSGTSYSLTISSMEAEDAAIYYCQQWNYPLLTFGAGTKLELK

SEQ ID NO: 1172 - protein, 118 aa, Artificial Sequence
  Description of Artificial Sequence: Synthetic polypeptide
EVQLQQSGPVLVKPGASVRMSCKASGYTFTDYNIHWVKQSHGRSLEWVGYINPYNGRTGYNQKFKAKATLTVDKSSSTAYMDLRSLTSEDSAVYYCARWDGSSYFDYWGQGTTLTVSS

SEQ ID NO: 1173 - protein, 118 aa, Artificial Sequence
  Description of Artificial Sequence: Synthetic polypeptide
QVQLVQSGAEVKKPGSSVKVSCKASGYTFTDYNIHWVRQAPGQGLEWVGYINPYNGRTGYNQKFKARATLTVDKSTSTAYMELSSLRSEDTAVYYCARWDGSSYFDYWGQGTTVTVSS

SEQ ID NO: 1174 - protein, 118 aa, Artificial Sequence
  Description of Artificial Sequence: Synthetic polypeptide
QVQLVQSGAEVKKPGASVKVSCKASGYTFTDYNIHWVRQAPGQGLEWVGYINPYNGRTGYNQKFKARATLTVDKSTSTAYMELRSLRSDDMAVYYCARWDGSSYFDYWGQGTTVTVSS

SEQ ID NO: 1175 - protein, 118 aa, Artificial Sequence
  Description of Artificial Sequence: Synthetic polypeptide
QVQLVQSGAEVKKPGASVKVSCKASGYTFTDYNIHWVRQATGQGLEWVGYINPYNGRTGYNQKFKARATLTVNKSISTAYMELSSLRSEDTAVYYCARWDGSSYFDYWGQGTTVTVSS

SEQ ID NO: 1176 - protein, 118 aa, Artificial Sequence
  Description of Artificial Sequence: Synthetic polypeptide
EVQLVESGGGLVQPGRSLRLSCTASGYTFTDYNIHWVRQAPGKGLEWVGYINPYNGRTGYNQKFKARATLSVDKSKSIAYLQMNSLKTEDTAVYYCARWDGSSYFDYWGQGTTVTVSS

SEQ ID NO: 1177 - protein, 118 aa, Artificial Sequence
  Description of Artificial Sequence: Synthetic polypeptide
QVQLVQSGSELKKPGASVKVSCKASGYTFTDYNIHWVRQAPGQGLEWVGYINPYNGRTGYNQKFKARAVLSVDKSVSTAYLQISSLKAEDTAVYYCARWDGSSYFDYWGQGTTVTVSS

SEQ ID NO: 1178 - protein, 106 aa, Artificial Sequence
  Description of Artificial Sequence: Synthetic polypeptide
EIVLTQSPATLSLSPGERATLSCSASSSVSYMHWYQQKPGQAPKLLIYEISKLASGIPARFSGSGSGTDYTLTISSLEPEDFAVYYCQQWNYPLLTFGQGTKLEIK

SEQ ID NO: 1179 - protein, 106 aa, Artificial Sequence
  Description of Artificial Sequence: Synthetic polypeptide
EIVLTQSPATLSLSPGERATLSCSASSSVSYMHWYQQKPGQAPKLLIYEISKLASGIPARFSGSGSGTDYTLTISRLEPEDFAVYYCQQWNYPLLTFGQGTKLEIK

SEQ ID NO: 1180 - protein, 106 aa, Artificial Sequence
  Description of Artificial Sequence: Synthetic polypeptide
EIVLTQSPDFQSVTPKEKVTITCSASSSVSYMHWYQQKPDQSPKLLIYEISKLASGVPSRFSGSGSGTDYTLTINSLEAEDAATYYCQQWNYPLLTFGQGTKLEIK

SEQ ID NO: 1181 - protein, 106 aa, Artificial Sequence
  Description of Artificial Sequence: Synthetic polypeptide
DIQLTQSPSFLSASVGDRVTITCSASSSVSYMHWYQQKPGKAPKLLIYEISKLASGVPSRFSGSGSGTEYTLTISSLQPEDFATYYCQQWNYPLLTFGQGTKLEIK

SEQ ID NO: 1182 - protein, 106 aa, Artificial Sequence
  Description of Artificial Sequence: Synthetic polypeptide
AIQLTQSPSSLSASVGDRVTITCSASSSVSYMHWYQQKPGKAPKLLIYEISKLASGVPSRFSGSGSGTDYTLTISSLQPEDFATYYCQQWNYPLLTFGQGTKLEIK

SEQ ID NO: 1183 - protein, 106 aa, Artificial Sequence
  Description of Artificial Sequence: Synthetic polypeptide
AIRLTQSPFSLSASVGDRVTITCSASSSVSYMHWYQQKPAKAPKLFIYEISKLASGVPSRFSGSGSGTDYTLTISSLQPEDFATYYCQQWNYPLLTFGQGTKLEIK

SEQ ID NO: 1184 - protein, 106 aa, Artificial Sequence
  Description of Artificial Sequence: Synthetic polypeptide
DIVLTQSPDSLAVSLGERATINCSASSSVSYMHWYQQKPGQPPKLLIYEISKLASGVPDRFSGSGSGTDYTLTISSLQAEDVAVYYCQQWNYPLLTFGQGTKLEIK

SEQ ID NO: 1185 - protein, 5 aa, Artificial Sequence
  Description of Artificial Sequence: Synthetic peptide
GSWMN

SEQ ID NO: 1186 - protein, 17 aa, Artificial Sequence
  Description of Artificial Sequence: Synthetic peptide
RIYPGDGDTDYSGKFKG

SEQ ID NO: 1187 - protein, 12 aa, Artificial Sequence
  Description of Artificial Sequence: Synthetic peptide
SGYFNYVPVFDY

SEQ ID NO: 1188 - protein, 7 aa, Artificial Sequence
  Description of Artificial Sequence: Synthetic peptide
GYTFSGS

SEQ ID NO: 1189 - protein, 6 aa, Artificial Sequence
  Description of Artificial Sequence: Synthetic peptide
YPGDGD

SEQ ID NO: 1190 - protein, 10 aa, Artificial Sequence
  Description of Artificial Sequence: Synthetic peptide
GYTFSGSWMN

SEQ ID NO: 1191 - protein, 10 aa, Artificial Sequence
  Description of Artificial Sequence: Synthetic peptide
SANSTVGYIH

SEQ ID NO: 1192 - protein, 7 aa, Artificial Sequence
  Description of Artificial Sequence: Synthetic peptide
TTSNLAS

SEQ ID NO: 1193 - protein, 8 aa, Artificial Sequence
  Description of Artificial Sequence: Synthetic peptide
HQWSFYPT

SEQ ID NO: 1194 - protein, 6 aa, Artificial Sequence
  Description of Artificial Sequence: Synthetic peptide
NSTVGY

SEQ ID NO: 1195 - protein, 105 aa, Artificial Sequence
  Description of Artificial Sequence: Synthetic polypeptide
QIVLTQSPAIMSASLGEEIALTCSANSTVGYIHWYQQKSGTSPKLLIYTTSNLASGVPSRFSGSGSGTFYSLTISSVEAEDAADYFCHQWSFYPTFGGGTKLEIK

SEQ ID NO: 1196 - protein, 121 aa, Artificial Sequence
  Description of Artificial Sequence: Synthetic polypeptide
QIQLQQSGPEVVKPGASVQISCKASGYTFSGSWMNWVKQRPGKGLEWIGRIYPGDGDTDYSGKFKGRATLTADKSSSTAYMRLSSLTSEDSAVYFCARSGYFNYVPVFDYWGQGTTLSVSS

SEQ ID NO: 1197 - protein, 121 aa, Artificial Sequence
  Description of Artificial Sequence: Synthetic polypeptide
QIQLVQSGAEVKKPGASVKVSCKASGYTFSGSWMNWVRQAPGQGLEWIGRIYPGDGDTDYSGKFKGRATLTADKSTSTAYMELSSLRSEDTAVYYCARSGYFNYVPVFDYWGQGTTVTVSS

SEQ ID NO: 1198 - protein, 121 aa, Artificial Sequence
  Description of Artificial Sequence: Synthetic polypeptide
QIQLVQSGAEVKKPGSSVKVSCKASGYTFSGSWMNWVRQAPGQGLEWIGRIYPGDGDTDYSGKFKGRATLTADKSTSTAYMELSSLRSEDTAVYYCARSGYFNYVPVFDYWGQGTTVTVSS

SEQ ID NO: 1199 - protein, 121 aa, Artificial Sequence
  Description of Artificial Sequence: Synthetic polypeptide
EIQLVQSGAEVKKPGESLKISCKASGYTFSGSWMNWVRQMPGKGLEWIGRIYPGDGDTDYSGKFKGQATLSADKSISTAYLQWSSLKASDTAMYYCARSGYFNYVPVFDYWGQGTTVTVSS

SEQ ID NO: 1200 - protein, 121 aa, Artificial Sequence
  Description of Artificial Sequence: Synthetic polypeptide
QIQLVQSGSELKKPGASVKVSCKASGYTFSGSWMNWVRQAPGQGLEWIGRIYPGDGDTDYSGKFKGRAVLSADKSVSTAYLQISSLKAEDTAVYYCARSGYFNYVPVFDYWGQGTTVTVSS

SEQ ID NO: 1201 - protein, 121 aa, Artificial Sequence
  Description of Artificial Sequence: Synthetic polypeptide
QIQLVQSGSELKKPGASVKVSCKASGYTFSGSWMNWVRQAPGQGLEWIGRIYPGDGDTDYSGKFKGRAVLSADKSVSMAYLQISSLKAEDTAVYYCARSGYFNYVPVFDYWGQGTTVTVSS

SEQ ID NO: 1202 - protein, 121 aa, Artificial Sequence
  Description of Artificial Sequence: Synthetic polypeptide
EIQLVESGGGLVQPGRSLRLSCTASGYTFSGSWMNWVRQAPGKGLEWIGRIYPGDGDTDYSGKFKGRATLSADKSKSIAYLQMNSLKTEDTAVYYCARSGYFNYVPVFDYWGQGTTVTVSS

SEQ ID NO: 1203 - protein, 105 aa, Artificial Sequence
  Description of Artificial Sequence: Synthetic polypeptide
EIVLTQSPATLSLSPGERATLSCSANSTVGYIHWYQQKPGQAPKLLIYTTSNLASGIPARFSGSGSGTDYTLTISSLEPEDFAVYFCHQWSFYPTFGQGTKLEIK

SEQ ID NO: 1204 - protein, 105 aa, Artificial Sequence
  Description of Artificial Sequence: Synthetic polypeptide
DIQLTQSPSFLSASVGDRVTITCSANSTVGYIHWYQQKPGKAPKLLIYTTSNLASGVPSRFSGSGSGTEYTLTISSLQPEDFATYFCHQWSFYPTFGQGTKLEIK

SEQ ID NO: 1205 - protein, 105 aa, Artificial Sequence
  Description of Artificial Sequence: Synthetic polypeptide
EIVLTQSPATLSLSPGERATLSCSANSTVGYIHWYQQKPGQAPKLLIYTTSNLASGIPARFSGSGPGTDYTLTISSLEPEDFAVYFCHQWSFYPTFGQGTKLEIK

SEQ ID NO: 1206 - protein, 105 aa, Artificial Sequence
  Description of Artificial Sequence: Synthetic polypeptide
DIVLTQSPDSLAVSLGERATINCSANSTVGYIHWYQQKPGQPPKLLIYTTSNLASGVPDRFSGSGSGTDYTLTISSLQAEDVAVYFCHQWSFYPTFGQGTKLEIK

SEQ ID NO: 1207 - protein, 105 aa, Artificial Sequence
  Description of Artificial Sequence: Synthetic polypeptide
EIVLTQSPDFQSVTPKEKVTITCSANSTVGYIHWYQQKPDQSPKLLIYTTSNLASGVPSRFSGSGSGTDYTLTINSLEAEDAATYFCHQWSFYPTFGQGTKLEIK

SEQ ID NO: 1208 - protein, 5 aa, Artificial Sequence
  Description of Artificial Sequence: Synthetic peptide
DYYMY

SEQ ID NO: 1209 - protein, 17 aa, Artificial Sequence
  Description of Artificial Sequence: Synthetic peptide
TISGGGSYTYSPDSVKG

SEQ ID NO: 1210 - protein, 14 aa, Artificial Sequence
  Description of Artificial Sequence: Synthetic peptide
ERDIYYGNFNAMVY

SEQ ID NO: 1211 - protein, 7 aa, Artificial Sequence
  Description of Artificial Sequence: Synthetic peptide
GFTFSDY

SEQ ID NO: 1212 - protein, 6 aa, Artificial Sequence
  Description of Artificial Sequence: Synthetic peptide
SGGGSY

SEQ ID NO: 1213 - protein, 10 aa, Artificial Sequence
  Description of Artificial Sequence: Synthetic peptide
GFTFSDYYMY

SEQ ID NO: 1214 - protein, 15 aa, Artificial Sequence
  Description of Artificial Sequence: Synthetic peptide
RASKSVSTSGYSYMH

SEQ ID NO: 1215 - protein, 7 aa, Artificial Sequence
  Description of Artificial Sequence: Synthetic peptide
LASNLES

SEQ ID NO: 1216 - protein, 9 aa, Artificial Sequence
  Description of Artificial Sequence: Synthetic peptide
QHSRDLPWT

SEQ ID NO: 1217 - protein, 11 aa, Artificial Sequence
  Description of Artificial Sequence: Synthetic peptide
SKSVSTSGYSY

SEQ ID NO: 1218 - protein, 111 aa, Artificial Sequence
  Description of Artificial Sequence: Synthetic polypeptide
DIVLTQSPVSLTVSLGQRATISCRASKSVSTSGYSYMHWYQQKPGQPPKLLIYLASNLESGVPARFSGSGSGTDFTLNIHPVEEEDAATYYCQHSRDLPWTFGGGTKLEIK

SEQ ID NO: 1219 - protein, 123 aa, Artificial Sequence
  Description of Artificial Sequence: Synthetic polypeptide
EVQLVESGGGLVKPGGSLKLSCAASGFTFSDYYMYWVRQTPEKRLEWVATISGGGSYTYSPDSVKGRFTISRDNAKNNLYLQMSSLRSEDTAMYFCARERDIYYGNFNAMVYWGRGTSVTVSS

SEQ ID NO: 1220 - protein, 123 aa, Artificial Sequence
  Description of Artificial Sequence: Synthetic polypeptide
EVQLLESGGGLVQPGGSLRLSCAASGFTFSDYYMYWVRQAPGKGLEWVATISGGGSYTYSPDSVKGRFTISRDNSKNTLYLQMNSLRAEDTAVYYCARERDIYYGNFNAMVYWGRGTLVTVSS

SEQ ID NO: 1221 - protein, 123 aa, Artificial Sequence
  Description of Artificial Sequence: Synthetic polypeptide
EVQLVESGGGLVQPGGSLRLSCAASGFTFSDYYMYWVRQAPGKGLEWVATISGGGSYTYSPDSVKGRFTISRDNAKNSLYLQMNSLRAEDTAVYYCARERDIYYGNFNAMVYWGRGTLVTVSS

SEQ ID NO: 1222 - protein, 123 aa, Artificial Sequence
  Description of Artificial Sequence: Synthetic polypeptide
QVQLVESGGGVVQPGRSLRLSCAASGFTFSDYYMYWVRQAPGKGLEWVATISGGGSYTYSPDSVKGRFTISRDNSKNTLYLQMNSLRAEDTAVYYCARERDIYYGNFNAMVYWGRGTLVTVSS

SEQ ID NO: 1223 - protein, 123 aa, Artificial Sequence
  Description of Artificial Sequence: Synthetic polypeptide
QVQLVESGGGLVKPGGSLRLSCAASGFTFSDYYMYWIRQAPGKGLEWVATISGGGSYTYSPDSVKGRFTISRDNAKNSLYLQMNSLRAEDTAVYYCARERDIYYGNFNAMVYWGRGTLVTVSS

SEQ ID NO: 1224 - protein, 111 aa, Artificial Sequence
  Description of Artificial Sequence: Synthetic polypeptide
EIVLTQSPGTLSLSPGERATLSCRASKSVSTSGYSYMHWYQQKPGQAPRLLIYLASNLESGIPDRFSGSGSGTDFTLTISRLEPEDFAVYYCQHSRDLPWTFGGGTKVEIK

SEQ ID NO: 1225 - protein, 111 aa, Artificial Sequence
  Description of Artificial Sequence: Synthetic polypeptide
EIVLTQSPATLSLSPGERATLSCRASKSVSTSGYSYMHWYQQKPGQAPRLLIYLASNLESGIPARFSGSGSGTDFTLTISSLEPEDFAVYYCQHSRDLPWTFGGGTKVEIK

SEQ ID NO: 1226 - protein, 111 aa, Artificial Sequence
  Description of Artificial Sequence: Synthetic polypeptide
DIQLTQSPSTLSASVGDRVTITCRASKSVSTSGYSYMHWYQQKPGKAPKLLIYLASNLESGVPSRFSGSGSGTEFTLTISSLQPDDFATYYCQHSRDLPWTFGGGTKVEIK

SEQ ID NO: 1227 - protein, 111 aa, Artificial Sequence
  Description of Artificial Sequence: Synthetic polypeptide
AIQLTQSPSSLSASVGDRVTITCRASKSVSTSGYSYMHWYQQKPGKAPKLLIYLASNLESGVPSRFSGSGSGTDFTLTISSLQPEDFATYYCQHSRDLPWTFGGGTKVEIK

SEQ ID NO: 1228 - skipped

SEQ ID NO: 1229 - protein, 5 aa, Artificial Sequence
  Description of Artificial Sequence: Synthetic peptide
GYFWN

SEQ ID NO: 1230 - protein, 16 aa, Artificial Sequence
  Description of Artificial Sequence: Synthetic peptide
YISYDGSNNYNPSLKN

SEQ ID NO: 1231 - protein, 11 aa, Artificial Sequence
  Description of Artificial Sequence: Synthetic peptide
PSPGTGYAVDY

SEQ ID NO: 1232 - protein, 8 aa, Artificial Sequence
  Description of Artificial Sequence: Synthetic peptide
GYSITSGY

SEQ ID NO: 1233 - protein, 6 aa, Artificial Sequence
  Description of Artificial Sequence: Synthetic peptide
SYDGSN

SEQ ID NO: 1234 - protein, 11 aa, Artificial Sequence
  Description of Artificial Sequence: Synthetic peptide
GYSITSGYFWN

SEQ ID NO: 1235 - protein, 16 aa, Artificial Sequence
  Description of Artificial Sequence: Synthetic peptide
RSSQSLVHSNGNTYLH

SEQ ID NO: 1236 - protein, 7 aa, Artificial Sequence
  Description of Artificial Sequence: Synthetic peptide
KVSNRFS

SEQ ID NO: 1237 - protein, 9 aa, Artificial Sequence
  Description of Artificial Sequence: Synthetic peptide
SQSTHVPFT

SEQ ID NO: 1238 - protein, 12 aa, Artificial Sequence
  Description of Artificial Sequence: Synthetic peptide
SQSLVHSNGNTY

SEQ ID NO: 1239 - protein, 112 aa, Artificial Sequence
  Description of Artificial Sequence: Synthetic polypeptide
NVVMTQTPLSLPVSLGDQASISCRSSQSLVHSNGNTYLHWYLQKPGQSPKFLIYKVSNRFSGVPDRFSGGGSGTEFTLKISRVEAEDLGVYFCSQSTHVPFTFGSGTKLEIK

SEQ ID NO: 1240 - protein, 120 aa, Artificial Sequence
  Description of Artificial Sequence: Synthetic polypeptide
NVQLQESGPGLVKPSQSLSLTCSVAGYSITSGYFWNWIRQFPGNKLEWMGYISYDGSNNYNPSLKNRISITRDTSKNQFFLKLNSVTTEDTATYYCASPSPGTGYAVDYWGQGTSVTVSS

SEQ ID NO: 1241 - protein, 120 aa, Artificial Sequence
  Description of Artificial Sequence: Synthetic polypeptide
QVQLQESGPGLVKPSETLSLTCTVSGYSITSGYFWNWIRQPPGKGLEWIGYISYDGSNNYNPSLKNRVTISRDTSKNQFSLKLSSVTAADTAVYYCASPSPGTGYAVDYWGQGTLVTVSS

SEQ ID NO: 1242 - protein, 120 aa, Artificial Sequence; identical to SEQ ID NO: 1241
  Description of Artificial Sequence: Synthetic polypeptide

SEQ ID NO: 1243 - protein, 120 aa, Artificial Sequence
  Description of Artificial Sequence: Synthetic polypeptide
QVQLVESGGGLVQPGGSLRLSCSVSGYSITSGYFWNWVRQAPGKGLEWVGYISYDGSNNYNPSLKNRFTISRDTSKNTFYLQMNSLRAEDTAVYYCASPSPGTGYAVDYWGQGTLVTVSS

SEQ ID NO: 1244 - protein, 111 aa, Artificial Sequence
  Description of Artificial Sequence: Synthetic polypeptide
VVMTQSPGTLSLSPGERATLSCRSSQSLVHSNGNTYLHWYQQKPGQAPRFLIYKVSNRFSGIPDRFSGSGSGTDFTLTISRLEPEDFAVYFCSQSTHVPFTFGQGTKLEIK

SEQ ID NO: 1245 - protein, 112 aa, Artificial Sequence
  Description of Artificial Sequence: Synthetic polypeptide
EVVMTQSPATLSLSPGERATLSCRSSQSLVHSNGNTYLHWYQQKPGQAPRFLIYKVSNRFSGIPARFSGSGSGTDFTLTISSLEPEDFAVYFCSQSTHVPFTFGQGTKLEIK

SEQ ID NO: 1246 - protein, 112 aa, Artificial Sequence
  Description of Artificial Sequence: Synthetic polypeptide
EVVMTQSPATLSVSPGERATLSCRSSQSLVHSNGNTYLHWYQQKPGQAPRFLIYKVSNRFSGIPARFSGSGSGTEFTLTISSLQSEDFAVYFCSQSTHVPFTFGQGTKLEIK

SEQ ID NO: 1247 - protein, 112 aa, Artificial Sequence
  Description of Artificial Sequence: Synthetic polypeptide
DVQMTQSPSSLSASVGDRVTITCRSSQSLVHSNGNTYLHWYQQKPGKAPKFLIYKVSNRFSGVPSRFSGSGSGTDFTFTISSLQPEDIATYFCSQSTHVPFTFGQGTKLEIK

SEQ ID NO: 1248 - protein, 5 aa, Artificial Sequence
  Description of Artificial Sequence: Synthetic peptide
DYIVH

SEQ ID NO: 1249 - protein, 17 aa, Artificial Sequence
  Description of Artificial Sequence: Synthetic peptide
WINTYTGTPTYADDFEG

SEQ ID NO: 1250 - protein, 13 aa, Artificial Sequence
  Description of Artificial Sequence: Synthetic peptide
SWRRGIRGIGFDY

SEQ ID NO: 1251 - protein, 7 aa, Artificial Sequence
  Description of Artificial Sequence: Synthetic peptide
GYTFTDY

SEQ ID NO: 1252 - protein, 6 aa, Artificial Sequence
  Description of Artificial Sequence: Synthetic peptide
NTYTGT

SEQ ID NO: 1253 - protein, 10 aa, Artificial Sequence
  Description of Artificial Sequence: Synthetic peptide
GYTFTDYIVH

SEQ ID NO: 1254 - protein, 11 aa, Artificial Sequence
  Description of Artificial Sequence: Synthetic peptide
KASKSINKYLA

SEQ ID NO: 1255 - protein, 7 aa, Artificial Sequence
  Description of Artificial Sequence: Synthetic peptide
DGSTLQS

SEQ ID NO: 1256 - protein, 9 aa, Artificial Sequence
  Description of Artificial Sequence: Synthetic peptide
QQHNEYPPT

SEQ ID NO: 1257 - protein, 7 aa, Artificial Sequence
  Description of Artificial Sequence: Synthetic peptide
SKSINKY

SEQ ID NO: 1258 - protein, 107 aa, Artificial Sequence
  Description of Artificial Sequence: Synthetic polypeptide
DVQMTQSPYNLAASPGESVSINCKASKSINKYLAWYQQKPGKPNKLLIYDGSTLQSGIPSRFSGSGSGTDFTLTIRGLEPEDFGLYYCQQHNEYPPTFGAGTKLELK

SEQ ID NO: 1259 - protein, 122 aa, Artificial Sequence
  Description of Artificial Sequence: Synthetic polypeptide
QLQLVQSGPELREPGESVKISCKASGYTFTDYIVHWVKQAPGKGLKWMGWINTYTGTPTYADDFEGRFVFSLEASASTANLQISNLKNEDTATYFCARSWRRGIRGIGFDYWGQGVMVTVSS

SEQ ID NO: 1260 - protein, 122 aa, Artificial Sequence
  Description of Artificial Sequence: Synthetic polypeptide
QLQLVQSGAEVKKPGASVKVSCKASGYTFTDYIVHWVRQAPGQGLEWMGWINTYTGTPTYADDFEGWVTMTLDASISTAYMELSRLRSDDTAVYYCARSWRRGIRGIGFDYWGQGTMVTVSS

SEQ ID NO: 1261 - protein, 122 aa, Artificial Sequence
  Description of Artificial Sequence: Synthetic polypeptide
QLQLVQSGAEVKKPGASVKVSCKASGYTFTDYIVHWVRQAPGQGLEWMGWINTYTGTPTYADDFEGRVTMTLDASTSTAYMELSSLRSEDTAVYYCARSWRRGIRGIGFDYWGQGTMVTVSS

SEQ ID NO: 1262 - protein, 122 aa, Artificial Sequence
  Description of Artificial Sequence: Synthetic polypeptide
QLQLVQSGAEVKKPGASVKVSCKASGYTFTDYIVHWVRQAPGQRLEWMGWINTYTGTPTYADDFEGRVTITLDASASTAYMELSSLRSEDMAVYYCARSWRRGIRGIGFDYWGQGTMVTVSS

SEQ ID NO: 1263 - protein, 122 aa, Artificial Sequence
  Description of Artificial Sequence: Synthetic polypeptide
QLQLVQSGAEVKKPGASVKVSCKASGYTFTDYIVHWVRQATGQGLEWMGWINTYTGTPTYADDFEGRVTMTLNASISTAYMELSSLRSEDTAVYYCARSWRRGIRGIGFDYWGQGTMVTVSS

SEQ ID NO: 1264 - protein, 107 aa, Artificial Sequence
  Description of Artificial Sequence: Synthetic polypeptide
EVVMTQSPGTLSLSPGERATLSCKASKSINKYLAWYQQKPGQAPRLLIYDGSTLQSGIPDRFSGSGSGTDFTLTISRLEPEDFAVYYCQQHNEYPPTFGQGTKLEIK

SEQ ID NO: 1265 - protein, 107 aa, Artificial Sequence
  Description of Artificial Sequence: Synthetic polypeptide
EVVMTQSPATLSLSPGERATLSCKASKSINKYLAWYQQKPGQAPRLLIYDGSTLQSGIPARFSGSGSGTDFTLTISSLEPEDFAVYYCQQHNEYPPTFGQGTKLEIK

SEQ ID NO: 1266 - protein, 107 aa, Artificial Sequence
  Description of Artificial Sequence: Synthetic polypeptide
DVQMTQSPSSLSASVGDRVTITCKASKSINKYLAWYQQKPGKAPKLLIYDGSTLQSGVPSRFSGSGSGTDFTLTISSLQPEDFATYYCQQHNEYPPTFGQGTKLEIK

SEQ ID NO: 1267 - protein, 107 aa, Artificial Sequence
  Description of Artificial Sequence: Synthetic polypeptide
AVRMTQSPSSFSASTGDRVTITCKASKSINKYLAWYQQKPGKAPKLLIYDGSTLQSGVPSRFSGSGSGTDFTLTISCLQSEDFATYYCQQHNEYPPTFGQGTKLEIK

SEQ ID NO: 1268 - protein, 5 aa, Artificial Sequence
  Description of Artificial Sequence: Synthetic peptide
NYGVH

SEQ ID NO: 1269 - protein, 16 aa, Artificial Sequence
  Description of Artificial Sequence: Synthetic peptide
VIWSDGSTDYDTAFIS

SEQ ID NO: 1270 - protein, 9 aa, Artificial Sequence
  Description of Artificial Sequence: Synthetic peptide
RAVVADFDY

SEQ ID NO: 1271 - protein, 6 aa, Artificial Sequence
  Description of Artificial Sequence: Synthetic peptide
GFSLTN

SEQ ID NO: 1272 - protein, 9 aa, Artificial Sequence
  Description of Artificial Sequence: Synthetic peptide
VIWSDGSTD

SEQ ID NO: 1273 - protein, 10 aa, Artificial Sequence
  Description of Artificial Sequence: Synthetic peptide
GFSLTNYGVH

SEQ ID NO: 1274 - protein, 117 aa, Artificial Sequence
  Description of Artificial Sequence: Synthetic polypeptide
QVQLKQSGPGLLQPSQSLSITCTVSGFSLTNYGVHWVRQSPGKGLEWLGVIWSDGSTDYDTAFISRLSISKDNSKSQVFFKLNSLQADDTAIYYCARRAVVADFDYWGQGTTLTVSS

SEQ ID NO: 1275 - protein, 16 aa, Artificial Sequence
  Description of Artificial Sequence: Synthetic peptide
KASKEVTIFGSISALH

SEQ ID NO: 1276 - protein, 7 aa, Artificial Sequence
  Description of Artificial Sequence: Synthetic peptide
NGAKLES

SEQ ID NO: 1277 - protein, 9 aa, Artificial Sequence
  Description of Artificial Sequence: Synthetic peptide
LQNKEVPFT

SEQ ID NO: 1278 - protein, 119 aa, Artificial Sequence
  Description of Artificial Sequence: Synthetic polypeptide
DIVLTQSPASLAVSLGQKATISCKASKEVTIFGSISALHWYQQKPGQPPKLIYNGAKLESGVSARFSDSGSQNRSPFGNQLSFTLTIAPVEADDAATYYCLQNKEVPFTFGSGTKLEIK

SEQ ID NO: 1279 - protein, 117 aa, Artificial Sequence
  Description of Artificial Sequence: Synthetic polypeptide
DIVLTQSPDSLAVSLGERATINCKASKEVTIFGSISALHWYQQKPGQPPKLLYNGAKLESGVSARFGVPDRFSRSGSGLDFTLTISSLQAEDVAVYYCLQNKEVPFTFGQGTKLEIK

SEQ ID NO: 1280 - protein, 117 aa, Artificial Sequence
  Description of Artificial Sequence: Synthetic polypeptide
EIVLTQSPDFQSVTPKEKVTITCKASKEVTIFGSISALHWYQQKPDQSPKLLYNGAKLESGVSARFGVPSRFSRSGSGLDFTLTINSLEAEDAATYYCLQNKEVPFTFGQGTKLEIK

SEQ ID NO: 1281 - protein, 117 aa, Artificial Sequence
  Description of Artificial Sequence: Synthetic polypeptide
AIQLTQSPSSLSASVGDRVTITCKASKEVTIFGSISALHWYQQKPGKAPKLLYNGAKLESGVSARFGVPSRFSRSGSGLDFTLTISSLQPEDFATYYCLQNKEVPFTFGQGTKLEIK

SEQ ID NO: 1282 - protein, 117 aa, Artificial Sequence
  Description of Artificial Sequence: Synthetic polypeptide
DIVLTQTPLSLSVTPGQPASISCKASKEVTIFGSISALHWYLQKPGQPPKLLYNGAKLESGVSARFGVPDRFSRSGSGLDFTLKISRVEAEDVGVYYCLQNKEVPFTFGQGTKLEIK

SEQ ID NO: 1283 - protein, 117 aa, Artificial Sequence
  Description of Artificial Sequence: Synthetic polypeptide
QVTLKESGPVLVKPTETLTLTCTVSGFSLTNYGVHWVRQPPGKALEWLGVIWSDGSTDYDTAFISRLTISKDNSKSQVVLTMTNMDPVDTATYYCARRAVVADFDYWGQGTTVTVSS

SEQ ID NO: 1284 - protein, 117 aa, Artificial Sequence
  Description of Artificial Sequence: Synthetic polypeptide
QVQLQESGPGLVKPSGTLSLTCAVSGFSLTNYGVHWVRQPPGKGLEWLGVIWSDGSTDYDTAFISRLTISKDNSKSQVSLKLSSVTAADTAVYYCARRAVVADFDYWGQGTTVTVSS

SEQ ID NO: 1285 - protein, 117 aa, Artificial Sequence
  Description of Artificial Sequence: Synthetic polypeptide
QVQLQQSGPGLVKPSQTLSLTCAVSGFSLTNYGVHWVRQSPSRGLEWLGVIWSDGSTDYDTAFISRLTINKDNSKSQVSLQLNSVTPEDTAVYYCARRAVVADFDYWGQGTTVTVSS

SEQ ID NO: 1286 - protein, 117 aa, Artificial Sequence
  Description of Artificial Sequence: Synthetic polypeptide
EVQLVESGGGLVQPGPSLRLSCTVSGFSLTNYGVHWVRQAPGKGLEWLGVIWSDGSTDYDTAFISRLTISKDNSKSIVYLQMNSLKTEDTAVYYCARRAVVADFDYWGQGTTVTVSS

SEQ ID NO: 1287 - protein, 117 aa, Artificial Sequence
  Description of Artificial Sequence: Synthetic polypeptide
EVQLVQSGAEVKKPGESLRISCKVSGFSLTNYGVHWVRQMPGKGLEWLGVIWSDGSTDYDTAFISQLTISKDNSISTVYLQWSSLKASDTAMYYCARRAVVADFDYWGQGTTVTVSS

SEQ ID NO: 1288 - protein, 5 aa, Artificial Sequence
  Description of Artificial Sequence: Synthetic peptide
SYGMS

SEQ ID NO: 1289 - protein, 17 aa, Artificial Sequence
  Description of Artificial Sequence: Synthetic peptide
LISSGGSYTYYTDSVKG

SEQ ID NO: 1290 - protein, 8 aa, Artificial Sequence
  Description of Artificial Sequence: Synthetic peptide
HGGNFFDY

SEQ ID NO: 1291 - protein, 7 aa, Artificial Sequence
  Description of Artificial Sequence: Synthetic peptide
GFTFRSY

SEQ ID NO: 1292 - protein, 6 aa, Artificial Sequence
  Description of Artificial Sequence: Synthetic peptide
SSGGSY

SEQ ID NO: 1293 - protein, 10 aa, Artificial Sequence
  Description of Artificial Sequence: Synthetic peptide
GFTFRSYGMS

SEQ ID NO: 1294 - protein, 10 aa, Artificial Sequence
  Description of Artificial Sequence: Synthetic peptide
SVSSSVSYMH

SEQ ID NO: 1295 - protein, 7 aa, Artificial Sequence
  Description of Artificial Sequence: Synthetic peptide
DTSKLAS

SEQ ID NO: 1296 - protein, 10 aa, Artificial Sequence
  Description of Artificial Sequence: Synthetic peptide
QQWSSNPQYT

SEQ ID NO: 1297 - protein, 6 aa, Artificial Sequence
  Description of Artificial Sequence: Synthetic peptide
SSSVSY

SEQ ID NO: 1298 - protein, 5 aa, Artificial Sequence
  Description of Artificial Sequence: Synthetic peptide
SSWMN

SEQ ID NO: 1299 - protein, 17 aa, Artificial Sequence
  Description of Artificial Sequence: Synthetic peptide
RIYPGDGDTKYNGKFKG

SEQ ID NO: 1300 - protein, 10 aa, Artificial Sequence
  Description of Artificial Sequence: Synthetic peptide
RGTGGWYFDV

SEQ ID NO: 1301 - protein, 10 aa, Artificial Sequence
  Description of Artificial Sequence: Synthetic peptide
RGTGGWYFDV

SEQ ID NO: 1302 - protein, 7 aa, Artificial Sequence
  Description of Artificial Sequence: Synthetic peptide
GYAFSSS

SEQ ID NO: 1303 - protein, 6 aa, Artificial Sequence
  Description of Artificial Sequence: Synthetic peptide
YPGDGD

SEQ ID NO: 1304 - protein, 10 aa, Artificial Sequence
  Description of Artificial Sequence: Synthetic peptide
GYAFSSSWMN

SEQ ID NO: 1305 - protein, 15 aa, Artificial Sequence
  Description of Artificial Sequence: Synthetic peptide
RASESVDSSGNSFMH

SEQ ID NO: 1306 - protein, 7 aa, Artificial Sequence
  Description of Artificial Sequence: Synthetic peptide
RASNLES

SEQ ID NO: 1307 - protein, 9 aa, Artificial Sequence
  Description of Artificial Sequence: Synthetic peptide
QQSFDDPFT

SEQ ID NO: 1308 - protein, 11 aa, Artificial Sequence
  Description of Artificial Sequence: Synthetic peptide
SESVDSSGNSF

SEQ ID NO: 1309 - protein, 246 aa, Artificial Sequence
  Description of Artificial Sequence: Synthetic polypeptide
QVQLVQSGAEVKKPGSSVKVSCKASGHDFDKFYIHWVRQAPGQGLEWMGRVSAGSGNVKYNEKFKGRVTITADTSTSTAYMELSSLRSEDTAVYYCAGSYYSYDVLDYWGQGTTVTVSSGGGGSGGGGSGGGGSGGGGSDIQMTQSPSFLSASVGDRVTITCKASQNVGNRVAWYQQKPGKAPKALIYSSSHRYKGVPSRFSGSGSGTEFTLTISSLQPEDFATYFCQQFKSYPLTFGQGTKLEIK

SEQ ID NO: 1310 - protein, 119 aa, Artificial Sequence; identical to SEQ ID NO: 94
  Description of Artificial Sequence: Synthetic polypeptide

SEQ ID NO: 1311 - protein, 119 aa, Artificial Sequence
  Description of Artificial Sequence: Synthetic polypeptide
QVQLVQSGAEVKKPGSSVKVSCKASGTDFKLTYIHWVRQAPGQGLEWMGRIFPGSGNVKYNEKFKGRVTITADTSTSTAYMELSSLRSEDTAVYYCAVSYYSYDVLDYWGQGTTVTVSS

SEQ ID NO: 1312 - protein, 119 aa, Artificial Sequence
  Description of Artificial Sequence: Synthetic polypeptide
QVQLVQSGAEVKKPGSSVKVSCKASGHDFRLTYIHWVRQAPGQGLEWMGRISAGSGNVKYNEKFKGRVTITADTSTSTAYMELSSLRSEDTAVYYCAVSYYSYDVLDYWGQGTTVTVSS

SEQ ID NO: 1313 - protein, 107 aa, Artificial Sequence; identical to SEQ ID NO: 90
  Description of Artificial Sequence: Synthetic polypeptide

SEQ ID NO: 1314 - protein, 107 aa, Artificial Sequence; identical to SEQ ID NO: 141
  Description of Artificial Sequence: Synthetic polypeptide

SEQ ID NO: 1315 - protein, 5 aa, Artificial Sequence
  Description of Artificial Sequence: Synthetic peptide
AYGVN

SEQ ID NO: 1316 - protein, 16 aa, Artificial Sequence
  Description of Artificial Sequence: Synthetic peptide
MIWGDGNTDYNSALKS

SEQ ID NO: 1317 - protein, 12 aa, Artificial Sequence
  Description of Artificial Sequence: Synthetic peptide
DRVTATLYAMDY

SEQ ID NO: 1318 - protein, 7 aa, Artificial Sequence
  Description of Artificial Sequence: Synthetic peptide
GFSLTAY

SEQ ID NO: 1319 - protein, 5 aa, Artificial Sequence
  Description of Artificial Sequence: Synthetic peptide
WGDGN

SEQ ID NO: 1320 - protein, 10 aa, Artificial Sequence
  Description of Artificial Sequence: Synthetic peptide
GFSLTAYGVN

SEQ ID NO: 1321 - protein, 11 aa, Artificial Sequence
  Description of Artificial Sequence: Synthetic peptide
SASQGISNYLN

SEQ ID NO: 1322 - protein, 7 aa, Artificial Sequence
  Description of Artificial Sequence: Synthetic peptide
YTSSLHS

SEQ ID NO: 1323 - protein, 9 aa, Artificial Sequence
  Description of Artificial Sequence: Synthetic peptide
QQYSKLPRT

SEQ ID NO: 1324 - protein, 107 aa, Artificial Sequence
  Description of Artificial Sequence: Synthetic polypeptide
DIQMTQSPSSLSASVGDRVTITCSASQGISNYLNWYQQTPGKAPKLLIYYTSSLHSGVPSRFSGSGSGTDYTFTISSLQPEDIATYYCQQYSKLPRTFGQGTKLQIT

SEQ ID NO: 1325 - protein, 120 aa, Artificial Sequence
  Description of Artificial Sequence: Synthetic polypeptide
QVQLQESGPGLVRPSQTLSLTCTVSGFSLTAYGVNWVRQPPGRGLEWLGMIWGDGNTDYNSALKSRVTMLKDTSKNQFSLRLSSVTAADTAVYYCARDRVTATLYAMDYWGQGSLVTVSS

SEQ ID NO: 1326 - protein, 246 aa, Artificial Sequence
  Description of Artificial Sequence: Synthetic polypeptide
QVQLVQSGAEVKKPGSSVKVSCKASGHDFRLTYIHWVRQAPGQGLEWMGRVSAGSGNTKYNEKFKGRVTITADTSTSTAYMELSSLRSEDTAVYYCAVSYYSYDVLDYWGQGTTVTVSSGGGGSGGGGSGGGGSGGGGSDIQMTQSPSFLSASVGDRVTITCKASQNVGDRVVWHQQKPGKAPKALIYSSSHRYKGVPSRFSGSGSGTEFTLTISSLQPEDFATYFCQQFKSYPLTFGQGTKLEIK

SEQ ID NO: 1327 - protein, 246 aa, Artificial Sequence
  Description of Artificial Sequence: Synthetic polypeptide
QVQLVQSGAEVKKPGSSVKVSCKASGHDFRLTYIHWVRQAPGQGLEWMGRVSAGSGNVKYNEKFKGRVTITADTSTSTAYMELSSLRSEDTAVYYCAVSYYSYDVLDYWGQGTTVTVSSGGGGSGGGGSGGGGSGGGGSDIQMTQSPSFLSASVGDRVTITCKASQNVGNRVVWHQQKPGKAPKALIYSSSHRYKGVPSRFSGSGSGTEFTLTISSLQPEDFATYFCQQFKSYPLTFGQGTKLEIK

SEQ ID NO: 1328 - protein, 246 aa, Artificial Sequence
  Description of Artificial Sequence: Synthetic polypeptide
QVQLVQSGAEVKKPGSSVKVSCKASGHDFRLTYIHWVRQAPGQGLEWMGRIYAGSGNVKYNEKFKGRVTITADTSTSTAYMELSSLRSEDTAVYYCAVSYYSYDVLDYWGQGTTVTVSSGGGGSGGGGSGGGGSGGGGSDIQMTQSPSFLSASVGDRVTITCKASQNVADRVVWHQQKPGKAPKALIYSSSHRYKGVPSRFSGSGSGTEFTLTISSLQPEDFATYFCQQFKSYPLTFGQGTKLEIK

SEQ ID NO: 1329 - protein, 246 aa, Artificial Sequence
  Description of Artificial Sequence: Synthetic polypeptide
QVQLVQSGAEVKKPGSSVKVSCKASGHDFKLTYIHWVRQAPGQGLEWMGRVSAGSGNTKYNEKFKGRVTITADTSTSTAYMELSSLRSEDTAVYYCAVSYYSYDVLDYWGQGTTVTVSSGGGGSGGGGSGGGGSGGGGSDIQMTQSPSFLSASVGDRVTITCKASQNVGDRVAWHQQKPGKAPKALIYSSSHRYKGVPSRFSGSGSGTEFTLTISSLQPEDFATYFCQQFKSYPLTFGQGTKLEIK

SEQ ID NO: 1330 - protein, 246 aa, Artificial Sequence
  Description of Artificial Sequence: Synthetic polypeptide
QVQLVQSGAEVKKPGSSVKVSCKASGHDFKLTYIHWVRQAPGQGLEWMGRVSAGSGNTKYNEKFKGRVTITADTSTSTAYMELSSLRSEDTAVYYCAVSYYSYDVLDYWGQGTTVTVSSGGGGSGGGGSGGGGSGGGGSDIQMTQSPSFLSASVGDRVTITCKASQNVDNRVAWHQQKPGKAPKALIYSSSHRYKGVPSRFSGSGSGTEFTLTISSLQPEDFATYFCQQFKSYPLTFGQGTKLEIK

SEQ ID NO: 1331 - protein, 246 aa, Artificial Sequence
  Description of Artificial Sequence: Synthetic polypeptide
QVQLVQSGAEVKKPGSSVKVSCKASGHDFRLTYIHWVRQAPGQGLEWMGRVSAGSGNVKYNEKFKGRVTITADTSTSTAYMELSSLRSEDTAVYYCAVSYYSYDVLDYWGQGTTVTVSSGGGGSGGGGSGGGGSGGGGSDIQMTQSPSFLSASVGDRVTITCKASQNVADRVVWHQQKPGKAPKALIYSSSHRYKGVPSRFSGSGSGTEFTLTISSLQPEDFATYFCQQFKSYPLTFGQGTKLEIK

SEQ ID NO: 1332 - protein, 246 aa, Artificial Sequence
  Description of Artificial Sequence: Synthetic polypeptide
QVQLVQSGAEVKKPGSSVKVSCKASGHDFRLTYIHWVRQAPGQGLEWMGRVYAGSGNTKYNEKFKGRVTITADTSTSTAYMELSSLRSEDTAVYYCAVSYYSYDVLDYWGQGTTVTVSSGGGGSGGGGSGGGGSGGGGSDIQMTQSPSFLSASVGDRVTITCKASQNVEDRVVWHQQKPGKAPKALIYSSSHRYKGVPSRFSGSGSGTEFTLTISSLQPEDFATYFCQQFKSYPLTFGQGTKLEIK

SEQ ID NO: 1333 - protein, 246 aa, Artificial Sequence
  Description of Artificial Sequence: Synthetic polypeptide
QVQLVQSGAEVKKPGSSVKVSCKASGHDFKLTYIHWVRQAPGQGLEWMGRVSAGSGNTKYNEKFKGRVTITADTSTSTAYMELSSLRSEDTAVYYCAVSYYSYDVLDYWGQGTTVTVSSGGGGSGGGGSGGGGSGGGGSDIQMTQSPSFLSASVGDRVTITCKASQNVADRVVWHQQKPGKAPKALIYSSSHRYKGVPSRFSGSGSGTEFTLTISSLQPEDFATYFCQQFKSYPLTFGQGTKLEIK

SEQ ID NO: 1334 - protein, 246 aa, Artificial Sequence
  Description of Artificial Sequence: Synthetic polypeptide
QVQLVQSGAEVKKPGSSVKVSCKASGHDFKLTYIHWVRQAPGQGLEWMGRISAGSGNTKYNEKFKGRVTITADTSTSTAYMELSSLRSEDTAVYYCAVSYYSYDVLDYWGQGTTVTVSSGGGGSGGGGSGGGGSGGGGSDIQMTQSPSFLSASVGDRVTITCKASQNVGDRVVWHQQKPGKAPKALIYSSSHRYKGVPSRFSGSGSGTEFTLTISSLQPEDFATYFCQQFKSYPLTFGQGTKLEIK

SEQ ID NO: 1335 - protein, 246 aa, Artificial Sequence
  Description of Artificial Sequence: Synthetic polypeptide
QVQLVQSGAEVKKPGSSVKVSCKASGHDFKLTYIHWVRQAPGQGLEWMGRIYAGSGNTKYNEKFKGRVTITADTSTSTAYMELSSLRSEDTAVYYCAVSYYSYDVLDYWGQGTTVTVSSGGGGSGGGGSGGGGSGGGGSDIQMTQSPSFLSASVGDRVTITCKASQNVGDRVVWHQQKPGKAPKALIYSSSHRYKGVPSRFSGSGSGTEFTLTISSLQPEDFATYFCQQFKSYPLTFGQGTKLEIK

SEQ ID NO: 1336 - protein, 246 aa, Artificial Sequence
  Description of Artificial Sequence: Synthetic polypeptide
QVQLVQSGAEVKKPGSSVKVSCKASGTDFKLTYIHWVRQAPGQGLEWMGRIFPGSGNVKYNEKFKGRVTITADTSTSTAYMELSSLRSEDTAVYYCAVSYYSYDVLDYWGQGTTVTVSSGGGGSGGGGSGGGGSGGGGSDIQMTQSPSFLSASVGDRVTITCKASQNVDNRVAWYQQKPGKAPKALIYSSSHRYKGVPSRFSGSGSGTEFTLTISSLQPEDFATYFCQQFKSYPLTFGQGTKLEIK

SEQ ID NO: 1337 - protein, 246 aa, Artificial Sequence
  Description of Artificial Sequence: Synthetic polypeptide
QVQLVQSGAEVKKPGSSVKVSCKASGHDFRLTYIHWVRQAPGQGLEWMGRISAGSGNVKYNEKFKGRVTITADTSTSTAYMELSSLRSEDTAVYYCAVSYYSYDVLDYWGQGTTVTVSSGGGGSGGGGSGGGGSGGGGSDIQMTQSPSFLSASVGDRVTITCKASQNVADRVAWYQQKPGKAPKALIYSSSHRYKGVPSRFSGSGSGTEFTLTISSLQPEDFATYFCQQFKSYPLTFGQGTKLEIK

SEQ ID NO: 1338 - protein, 243 aa, Artificial Sequence
  Description of Artificial Sequence: Synthetic polypeptide
EVQLVESGGGLVQPGGSLRLSCAASGFTFSNFGMHWVRQAPGKGLEWVSYISSGSSTIYYADTLKGRFTISRDNSKNTLYLQMNSLRAEDTAVYYCARRGEGAMDYWGQGTTVTVSSGGGGSGGGGSGGGGSGGGGSDNQLTQSPSSLSASVGDRVTITCRASSSVNYIYWYQQKPGKAPKLLIYYTSNLAPGVPSRFSGSGSGNDYTLTISSLQPEDFATYYCQQFTSSPFTFGQGTKLEIK

SEQ ID NO: 1339 - protein, 242 aa, Artificial Sequence
  Description of Artificial Sequence: Synthetic polypeptide
EVQLVESGGGLVQPGGSLRLSCAASGFTFSNFGMHWVRQAPGKGLEWVSYISSGSSTIYYADTLKGRFTISRDNSKNTLYLQMNSLRAEDTAVYYCARRGEGAMDYWGQGTTVTVSSGGGGSGGGGSGGGGSGGGGSSNELTQPPSVSVSPGQTARITCRASSSVNYIYWYQQKSGQAPVLVIYYTSNLAPGIPERFSGSGSGNMYTLTISGAQVEDEADYYCQQFTSSPFTFGTGTKVTVL

SEQ ID NO: 1340 - protein, 243 aa, Artificial Sequence
  Description of Artificial Sequence: Synthetic polypeptide
QVQLVESGGGVVQPGRSLRLSCAASGFTFSNFGMHWVRQAPGKGLEWVAYISSGSSTIYYADTLKGRFTISRDNSKNTLYLQMNSLRAEDTAVYYCARRGEGAMDYWGQGTTVTVSSGGGGSGGGGSGGGGSGGGGSDNQLTQSPSFLSASVGDRVTITCRASSSVNYIYWYQQKPGKAPKLLIYYTSNLAPGVPSRFSGSGSGNEYTLTISSLQPEDFATYYCQQFTSSPFTFGQGTKLEIK

SEQ ID NO: 1341 - protein, 243 aa, Artificial Sequence
  Description of Artificial Sequence: Synthetic polypeptide
QVQLVESGGGVVQPGRSLRLSCAASGFTFSNFGMHWVRQAPGKGLEWVAYISSGSSTIYYADTLKGRFTISRDNSKNTLYLQMNSLRAEDTAVYYCARRGEGAMDYWGQGTTVTVSSGGGGSGGGGSGGGGSGGGGSDNQLTQSPSSLSASVGDRVTITCRASSSVNYIYWYQQKPGKAPKLLIYYTSNLAPGVPSRFSGSGSGNDYTLTISSLQPEDFATYYCQQFTSSPFTFGQGTKLEIK

SEQ ID NO: 1342 - protein, 242 aa, Artificial Sequence
  Description of Artificial Sequence: Synthetic polypeptide
QVQLVESGGGVVQPGRSLRLSCAASGFTFSNFGMHWVRQAPGKGLEWVAYISSGSSTIYYADTLKGRFTISRDNSKNTLYLQMNSLRAEDTAVYYCARRGEGAMDYWGQGTTVTVSSGGGGSGGGGSGGGGSGGGGSSNELTQPPSVSVSPGQTARITCRASSSVNYIYWYQQKSGQAPVLVIYYTSNLAPGIPERFSGSGSGNMYTLTISGAQVEDEADYYCQQFTSSPFTFGTGTKVTVL

SEQ ID NO: 1343 - skipped

SEQ ID NO: 1344 - protein, 119 aa, Artificial Sequence
  Description of Artificial Sequence: Synthetic polypeptide
QVQLVQSGAEVKKPGSSVKVSCKASGHDFRLTYIHWVRQAPGQGLEWMGRVSAGSGNTKYNEKFKGRVTITADTSTSTAYMELSSLRSEDTAVYYCAVSYYSYDVLDYWGQGTTVTVSS

SEQ ID NO: 1345 - skipped

SEQ ID NO: 1346 - protein, 119 aa, Artificial Sequence
  Description of Artificial Sequence: Synthetic polypeptide
QVQLVQSGAEVKKPGSSVKVSCKASGHDFRLTYIHWVRQAPGQGLEWMGRVSAGSGNVKYNEKFKGRVTITADTSTSTAYMELSSLRSEDTAVYYCAVSYYSYDVLDYWGQGTTVTVSS

SEQ ID NO: 1347 - protein, 107 aa, Artificial Sequence
  Description of Artificial Sequence: Synthetic polypeptide
DIQMTQSPSFLSASVGDRVTITCKASQNVGNRVVWHQQKPGKAPKALIYSSSHRYKGVPSRFSGSGSGTEFTLTISSLQPEDFATYFCQQFKSYPLTFGQGTKLEIK

SEQ ID NO: 1348 - protein, 119 aa, Artificial Sequence
  Description of Artificial Sequence: Synthetic polypeptide
QVQLVQSGAEVKKPGSSVKVSCKASGHDFRLTYIHWVRQAPGQGLEWMGRIYAGSGNVKYNEKFKGRVTITADTSTSTAYMELSSLRSEDTAVYYCAVSYYSYDVLDYWGQGTTVTVSS

SEQ ID NO: 1349 - protein, 107 aa, Artificial Sequence
  Description of Artificial Sequence: Synthetic polypeptide
DIQMTQSPSFLSASVGDRVTITCKASQNVADRVVWHQQKPGKAPKALIYSSSHRYKGVPSRFSGSGSGTEFTLTISSLQPEDFATYFCQQFKSYPLTFGQGTKLEIK

SEQ ID NO: 1350 - protein, 119 aa, Artificial Sequence
  Description of Artificial Sequence: Synthetic polypeptide
QVQLVQSGAEVKKPGSSVKVSCKASGHDFKLTYIHWVRQAPGQGLEWMGRVSAGSGNTKYNEKFKGRVTITADTSTSTAYMELSSLRSEDTAVYYCAVSYYSYDVLDYWGQGTTVTVSS

SEQ ID NO: 1351 - protein, 107 aa, Artificial Sequence; identical to SEQ ID NO: 160
  Description of Artificial Sequence: Synthetic polypeptide

SEQ ID NO: 1352 - skipped

SEQ ID NO: 1353 - protein, 107 aa, Artificial Sequence; identical to SEQ ID NO: 199
  Description of Artificial Sequence: Synthetic polypeptide

SEQ ID NO: 1354-1355 - skipped (2 entries)

SEQ ID NO: 1356 - protein, 119 aa, Artificial Sequence
  Description of Artificial Sequence: Synthetic polypeptide
QVQLVQSGAEVKKPGSSVKVSCKASGHDFRLTYIHWVRQAPGQGLEWMGRVYAGSGNTKYNEKFKGRVTITADTSTSTAYMELSSLRSEDTAVYYCAVSYYSYDVLDYWGQGTTVTVSS

SEQ ID NO: 1357 - protein, 107 aa, Artificial Sequence
  Description of Artificial Sequence: Synthetic polypeptide
DIQMTQSPSFLSASVGDRVTITCKASQNVEDRVVWHQQKPGKAPKALIYSSSHRYKGVPSRFSGSGSGTEFTLTISSLQPEDFATYFCQQFKSYPLTFGQGTKLEIK

SEQ ID NO: 1358-1359 - skipped (2 entries)

SEQ ID NO: 1360 - protein, 119 aa, Artificial Sequence
  Description of Artificial Sequence: Synthetic polypeptide
QVQLVQSGAEVKKPGSSVKVSCKASGHDFKLTYIHWVRQAPGQGLEWMGRISAGSGNTKYNEKFKGRVTITADTSTSTAYMELSSLRSEDTAVYYCAVSYYSYDVLDYWGQGTTVTVSS

SEQ ID NO: 1361 - protein, 107 aa, Artificial Sequence
  Description of Artificial Sequence: Synthetic polypeptide
DIQMTQSPSFLSASVGDRVTITCKASQNVGDRVVWHQQKPGKAPKALIYSSSHRYKGVPSRFSGSGSGTEFTLTISSLQPEDFATYFCQQFKSYPLTFGQGTKLEIK

SEQ ID NO: 1362 - protein, 119 aa, Artificial Sequence
  Description of Artificial Sequence: Synthetic polypeptide
QVQLVQSGAEVKKPGSSVKVSCKASGHDFKLTYIHWVRQAPGQGLEWMGRIYAGSGNTKYNEKFKGRVTITADTSTSTAYMELSSLRSEDTAVYYCAVSYYSYDVLDYWGQGTTVTVSS

SEQ ID NO: 1363-1364 - skipped (2 entries)

SEQ ID NO: 1365 - protein, 107 aa, Artificial Sequence
  Description of Artificial Sequence: Synthetic polypeptide
DIQMTQSPSFLSASVGDRVTITCRASQNVDNRLGWHQQKPGKAPKALIYSSSHRYKGVPSRFSGSGSGTEFTLTISSLQPEDFATYFCQQFKSYPLTFGQGTKLEIK

SEQ ID NO: 1366 - skipped

SEQ ID NO: 1367 - protein, 107 aa, Artificial Sequence
  Description of Artificial Sequence: Synthetic polypeptide
DIQMTQSPSFLSASVGDRVTITCKASQNVDNRVAWHQQKPGKAPKALIYAASSLQKGVPSRFSGSGSGTEFTLTISSLQPEDFATYFCQQFKSYPLTFGQGTKLEIK

SEQ ID NO: 1368 - skipped

SEQ ID NO: 1369 - protein, 107 aa, Artificial Sequence
  Description of Artificial Sequence: Synthetic polypeptide
DIQMTQSPSFLSASVGDRVTITCKASQNVDNRVAWHQQKPGKAPKALIYSSSHRYKGVPSRFSGSGSGTEFTLTISSLQPEDFATYFCLQHNSYPLTFGQGTKLEIK

SEQ ID NO: 1370 - protein, 119 aa, Artificial Sequence
  Description of Artificial Sequence: Synthetic polypeptide
QVQLVQSGAEVKKPGSSVKVSCKASGHDFKLTYIHWVRQAPGQGLEWMGRVSAGSGNVNYAQKFQGRVTITADTSTSTAYMELSSLRSEDTAVYYCAVSYYSYDVLDYWGQGTTVTVSS

SEQ ID NO: 1371-1375 - skipped (5 entries)

SEQ ID NO: 1376 - protein, 252 aa, Artificial Sequence
  Description of Artificial Sequence: Synthetic polypeptide
QVQLQQSGTELMKPGASVKISCKASGYTFSNYWIEWIKQRPGHGLEWVGEILPGAGPTNYNEKFKGKATFTADSSSNTAYMQLSSLTSEDSAVYYCARTDYDYDWFAYWGQGTLVTVSAGGGGSGGGGSGGGGSGGGGSDIVMSQSPSSLAVSVGEKVTMSCKSSQSLLYSGNQKNYLAWYQQKPGQSPKLLIYWASTRESGVPDRFTGSGSGTDFTLTINSVKAEDLTVYYCQQYYGYPRTFGGGTKVEIK

SEQ ID NO: 1377-2169 - skipped (793 entries)

SEQ ID NO: 2170 - protein, 114 aa, Homo sapiens
NWVNVISDLKKIEDLIQSMHIDATLYTESDVHPSCKVTAMKCFLLELQVISLESGDASIHDTVENLIILANNSLSSNGNVTESGCKECEELEEKNIKEFLQSFVHIVQMFINTS

SEQ ID NO: 2171-2179 - skipped (9 entries)

SEQ ID NO: 2180 - protein, 77 aa, Artificial Sequence
  Description of Artificial Sequence: Synthetic polypeptide
MAPRRARGCRTLGLPALLLLLLLRPPATRGITCPPPMSVEHADIWVKSYSLYSRERYICNSGFKRKAGTSSLTECVL

SEQ ID NO: 2181-2189 - skipped (9 entries)

SEQ ID NO: 2190 - protein, 20 aa, Artificial Sequence
  Description of Artificial Sequence: Synthetic peptide
SGGSGGGGSGGGSGGGGSLQ

SEQ ID NO: 2191 - protein, 133 aa, Homo sapiens [sequence omitted]

SEQ ID NO: 2192 - protein, 157 aa, Homo sapiens
YFGKLESKLSVIRNLNDQVLFIDQGNRPLFEDMTDSDCRDNAPRTIFIISMYKDSQPRGMAVTISVKCEKISTLSCENKIISFKEMNPPDNIKDTKSDIIFFQRSVPGHDNKMQFESSSYEGYFLACEKERDLFKLILKKEDELGDRSIMFTVQNED

SEQ ID NO: 2193 - protein, 133 aa, Homo sapiens [sequence omitted]

SEQ ID NO: 2194 - protein, 138 aa, Homo sapiens
QDPYVKEAENLKKYFNAGHSDVADNGTLFLGILKNWKEESDRKIMQSQIVSFYFKLFKNFKDDQSIQKSVETIKEDMNVKFFNSNKKKRDDFEKLTNYSVTDLNVQRKAIHELIQVMAELSPAAKTGKRKRSQMLFRG

SEQ ID NO: 2195-2269 - skipped (75 entries)

SEQ ID NO: 2270 - protein, 133 aa, Homo sapiens
APTSSSTKKTQLQLEHLLLDLQMILNGINNYKNPKLTRMLTFKFYMPKKATELKHLQCLEEELKPLEEVLNLAQSKNFHLRPRDLISNINVIVLELKGSETTFMCEYADETATIVEFLNRWITFAQSIISTLT

SEQ ID NO: 2271-2279 - skipped (9 entries)

SEQ ID NO: 2280 - protein, 133 aa, Homo sapiens
APASSSTKKTQLQLEHLLLDLQMILNGINNYKNPKLTRMLTAKFAMPKKATELKHLQCLEEELKPLEEVLNGAQSKNFHLRPRDLISNINVIVLELKGSETTFMCEYADETATIVEFLNRWITFAQSIISTLT

SEQ ID NO: 2281-2289 - skipped (9 entries)

SEQ ID NO: 2290 - protein, 518 aa, Homo sapiens
IWELKKDVYVVELDWYPDAPGEMVVLTCDTPEEDGITWTLDQSSEVLGSGKTLTIQVKEFGDAGQYTCHKGGEVLSHSLLLLHKKEDGIWSTDILKDQKEPKNKTFLRCEAKNYSGRFTCWWLTTISTDLTFSVKSSRGSSDPQGVTCGAATLSAERVRGDNKEYEYSVECQEDSACPAAEESLPIEVMVDAVHKLKYENYTSSFFIRDIIKPDPPKNLQLKPLKNSRQVEVSWEYPDTWSTPHSYFSLTFCVQVQGKSKREKKDRVFTDKTSATVICRKNASISVRAQDRYYSSSWSEWASVPCSGGGGSGGGGSGGGGSRNLPVATPDPGMFPCLHHSQNLLRAVSNMLQKARQTLEFYPCTSEEIDHEDITKDKTSTVEACLPLELTKNESCLNSRETSFITNGSCLASRKTSFMMALCLSSIYEDLKMYQVEFKTMNAKLLMDPKRQIFLDQNMLAVIDELMQALNFNSETVPQKSSLEEPDFYKTKIKLCILLHAFRIRAVTIDRVMSYLNAS

SEQ ID NO: 2291-2299 - skipped (9 entries)

SEQ ID NO: 2300 - protein, 340 aa, Homo sapiens
SPGQGTQSENSCTHFPGNLPNMLRDLRDAFSRVKTFFQMKDQLDNLLLKESLLEDFKGYLGCQALSEMIQFYLEEVMPQAENQDPDIKAHVNSLGENLKTLRLRLRRCHRFLPCENKSKAVEQVKNAFNKLQEKGIYKAMSEFDIFINYIEAYMTMKIRNGGGGSGGGGSGGGGSGGGGSSPGQGTQSENSCTHFPGNLPNMLRDLRDAFSRVKTFFQMKDQLDNLLLKESLLEDFKGYLGCQALSEMIQFYLEEVMPQAENQDPDIKAHVNSLGENLKTLRLRLRRCHRFLPCENKSKAVEQVKNAFNKLQEKGIYKAMSEFDIFINYIEAYMTMKIRN

SEQ ID NO: 2301-2309 - skipped (9 entries)

SEQ ID NO: 2310 - protein, 166 aa, Homo sapiens
SPGQGTQSENSCTHFPGNLPNMLRDLRDAFSRVKTFFQMKDQLDNLLLKESLLEDFKGYLGCQALSEMIQFYLEEVMPQAENQDPDIKAHVNSLGENLKTLRLRLRRCHRFLPCENGGGSGGKSKAVEQVKNAFNKLQEKGIYKAMSEFDIFINYIEAYMTMKIRN

SEQ ID NO: 2311-2319 - skipped (9 entries)

SEQ ID NO: 2320 - protein, 114 aa, Homo sapiens
NWVNVISDLKKIEDLIQSMHIDATLYTESDVHPSCKVTAMKCFLLELQVISLASGDASIHDTVENLIILANNSLSSNGAVTESGCKECEELEEKNIKEFLQSFVHIVQMFINTS

SEQ ID NO: 2321-2999 - skipped (679 entries)

SEQ ID NO: 3000 - protein, 107 aa, Artificial Sequence
  Description of Artificial Sequence: Synthetic polypeptide
DIQMTQSPSFLSASVGDRVTITCSASQGISNYLNWYQQKPGKAVKLLIYYTSSLHSGVPSRFSGSGSGTEYTLTISSLQPEDFATYYCQQYSKLPRTFGGGTKVEIK

SEQ ID NO: 3001 - protein, 107 aa, Artificial Sequence
  Description of Artificial Sequence: Synthetic polypeptide
DIQMTQSPSSLSASVGDRVTITCSASQGISNYLNWYQQKPGKAVKLLIYYTSSLHSGVPSRFSGSGSGTDYTLTISSLQPEDFATYYCQQYSKLPRTFGGGTKVEIK

SEQ ID NO: 3002 - protein, 107 aa, Artificial Sequence
  Description of Artificial Sequence: Synthetic polypeptide
DIQMTQSPSSLSASVGDRVTITCSASQGISNYLNWYQQKPGKVVKLLIYYTSSLHSGVPSRFSGSGSGTDYTLTISSLQPEDVATYYCQQYSKLPRTFGGGTKVEIK

SEQ ID NO: 3003 - protein, 107 aa, Artificial Sequence
  Description of Artificial Sequence: Synthetic polypeptide
DIQMTQSPSSLSASVGDRVTITCSASQGISNYLNWYQQKPGQAVKLLIYYTSSLHSGVPSRFSGSGSGTDYTLTISSLQPEDVATYYCQQYSKLPRTFGGGTKVEIK

SEQ ID NO: 3004 - protein, 107 aa, Artificial Sequence
  Description of Artificial Sequence: Synthetic polypeptide
DIQMTQSPSSLSASVGDRVTITCSASQGISNYLNWYQQKPGKAVKLLIYYTSSLHSGVPSRFSGSGSGTDYTFTISSLQPEDIATYYCQQYSKLPRTFGGGTKVEIK

SEQ ID NO: 3005 - protein, 107 aa, Artificial Sequence
  Description of Artificial Sequence: Synthetic polypeptide
DIQMTQSPSSLSASVGDRVTITCSASQGISNYLNWYQQKPGKTVKLLIYYTSSLHSGIPSRFSGSGSGTDYTLTIRSLQPEDFATYYCQQYSKLPRTFGGGTKVEIK

SEQ ID NO: 3006 - protein, 107 aa, Artificial Sequence
  Description of Artificial Sequence: Synthetic polypeptide
AIQMTQSPSSLSASVGDRVTITCSASQGISNYLNWYQQKPGKAVKLLIYYTSSLHSGVPSRFSGSGSGTDYTLTISSLQPEDFATYYCQQYSKLPRTFGGGTKVEIK

SEQ ID NO: 3007 - protein, 107 aa, Artificial Sequence
  Description of Artificial Sequence: Synthetic polypeptide
DIQMTQSPSSVSASVGDRVTITCSASQGISNYLNWYQQKPGKAVKLLIYYTSSLHSGVPSRFSGSGSGTDYTLTISSLQPEDFATYYCQQYSKLPRTFGGGTKVEIK

SEQ ID NO: 3008 - protein, 107 aa, Artificial Sequence
  Description of Artificial Sequence: Synthetic polypeptide
DIQMTQSPSSLSASVGDRVTITCSASQGISNYLNWYQQKPGKAVKRLIYYTSSLHSGVPSRFSGSGSGTEYTLTISNLQPEDFATYYCQQYSKLPRTFGGGTKVEIK

SEQ ID NO: 3009 - protein, 107 aa, Artificial Sequence
  Description of Artificial Sequence: Synthetic polypeptide
AIRMTQSPFSLSASVGDRVTITCSASQGISNYLNWYQQKPAKAVKLFIYYTSSLHSGVPSRFSGSGSGTDYTLTISSLQPEDFATYYCQQYSKLPRTFGGGTKVEIK

SEQ ID NO: 3010 - protein, 107 aa, Artificial Sequence
  Description of Artificial Sequence: Synthetic polypeptide
DIQMTQSPSSLSASVGDRVTITCSASQGISNYLNWYQQKPGKAVKRLIYYTSSLHSGVPSRFSGSGSGTEYTLTISSLQPEDFATYYCQQYSKLPRTFGGGTKVEIK

SEQ ID NO: 3011 - protein, 107 aa, Artificial Sequence
  Description of Artificial Sequence: Synthetic polypeptide
DIQMTQSPSTLSASVGDRVTITCSASQGISNYLNWYQQKPGKAVKLLIYYTSSLHSGVPSRFSGSGSGTEYTLTISSLQPDDFATYYCQQYSKLPRTFGGGTKVEIK

SEQ ID NO: 3012 - protein, 107 aa, Artificial Sequence
  Description of Artificial Sequence: Synthetic polypeptide
DIQMTQSPSSLSASVGDRVTITCSASQGISNYLNWYQQKPGKAVKSLIYYTSSLHSGVPSRFSGSGSGTDYTLTISSLQPEDFATYYCQQYSKLPRTFGGGTKVEIK

SEQ ID NO: 3013 - protein, 107 aa, Artificial Sequence
  Description of Artificial Sequence: Synthetic polypeptide
DIQMTQSPSSLSASVGDRVTITCSASQGISNYLNWYQQKPGKAVKSLIYYTSSLHSGVPSKFSGSGSGTDYTLTISSLQPEDFATYYCQQYSKLPRTFGGGTKVEIK

SEQ ID NO: 3014 - protein, 107 aa, Artificial Sequence
  Description of Artificial Sequence: Synthetic polypeptide
DIQMTQSPSSLSASVGDRVTITCSASQGISNYLNWYQQKPEKAVKSLIYYTSSLHSGVPSRFSGSGSGTDYTLTISSLQPEDFATYYCQQYSKLPRTFGGGTKVEIK

SEQ ID NO: 3015 - protein, 107 aa, Artificial Sequence
  Description of Artificial Sequence: Synthetic polypeptide
DIQMTQSPSAMSASVGDRVTITCSASQGISNYLNWYQQKPGKVVKRLIYYTSSLHSGVPSRFSGSGSGTEYTLTISSLQPEDFATYYCQQYSKLPRTFGGGTKVEIK

SEQ ID NO: 3016 - protein, 107 aa, Artificial Sequence
  Description of Artificial Sequence: Synthetic polypeptide
DIVMTQSPDSLAVSLGERATINCSASQGISNYLNWYQQKPGQPVKLLIYYTSSLHSGVPDRFSGSGSGTDYTLTISSLQAEDVAVYYCQQYSKLPRTFGGGTKVEIK

SEQ ID NO: 3017 - protein, 107 aa, Artificial Sequence
  Description of Artificial Sequence: Synthetic polypeptide
EIVMTQSPGTLSLSPGERATLSCSASQGISNYLNWYQQKPGQAVKLLIYYTSSLHSGIPDRFSGSGSGTDYTLTISRLEPEDFAVYYCQQYSKLPRTFGGGTKVEIK

SEQ ID NO: 3018 - protein, 107 aa, Artificial Sequence
  Description of Artificial Sequence: Synthetic polypeptide
EIVMTQSPPTLSLSPGERVTLSCSASQGISNYLNWYQQKPGQAVKLLIYYTSSLHSGIPARFSGSGSGTDYTLTISSLQPEDFAVYYCQQYSKLPRTFGGGTKVEIK

SEQ ID NO: 3019 - protein, 107 aa, Artificial Sequence
  Description of Artificial Sequence: Synthetic polypeptide
EIVMTQSPPTLSLSPGERVTLSCSASQGISNYLNWYQQKPGQAVKLLIYYTSSLHSSIPARFSGSGSGTDYTLTISSLQPEDFAVYYCQQYSKLPRTFGGGTKVEIK

SEQ ID NO: 3020 - protein, 107 aa, Artificial Sequence
  Description of Artificial Sequence: Synthetic polypeptide
EIVMTQSPATLSLSPGERATLSCSASQGISNYLNWYQQKPGQAVKLLIYYTSSLHSGIPARFSGSGSGTDYTLTISSLEPEDFAVYYCQQYSKLPRTFGGGTKVEIK

SEQ ID NO: 3021 - protein, 107 aa, Artificial Sequence
  Description of Artificial Sequence: Synthetic polypeptide
EIVMTQSPATLSLSPGERATLSCSASQGISNYLNWYQQKPGQAVKLLIYYTSSLHSGIPARFSGSGSGTDYTLTISRLEPEDFAVYYCQQYSKLPRTFGGGTKVEIK

SEQ ID NO: 3022 - protein, 107 aa, Artificial Sequence
  Description of Artificial Sequence: Synthetic polypeptide
EIVMTQSPATLSLSPGERATLSCSASQGISNYLNWYQQKPGQAVKLLIYYTSSLHSGIPDRFSGSGSGTDYTLTISRLEPEDFAVYYCQQYSKLPRTFGGGTKVEIK

SEQ ID NO: 3023 - protein, 107 aa, Artificial Sequence
  Description of Artificial Sequence: Synthetic polypeptide
EIVMTQSPATLSLSPGERATLSCSASQGISNYLNWYQQKPGLAVKLLIYYTSSLHSGIPDRFSGSGSGTDYTLTISRLEPEDFAVYYCQQYSKLPRTFGGGTKVEIK

SEQ ID NO: 3024 - protein, 107 aa, Artificial Sequence
  Description of Artificial Sequence: Synthetic polypeptide
DIQMIQSPSFLSASVGDRVSIICSASQGISNYLNWYLQKPGKSVKLFIYYTSSLHSGVSSRFSGRGSGTDYTLTIISLKPEDFAAYYCQQYSKLPRTFGGGTKVEIK

SEQ ID NO: 3025 - protein, 107 aa, Artificial Sequence
  Description of Artificial Sequence: Synthetic polypeptide
EIVMTQSPATLSLSPGERATLSCSASQGISNYLNWYQQKPGQAVKLLIYYTSSLHSGIPARFSGSGSGTDYTLTISSLQPEDFAVYYCQQYSKLPRTFGGGTKVEIK

SEQ ID NO: 3026 - protein, 107 aa, Artificial Sequence
  Description of Artificial Sequence: Synthetic polypeptide
EIVMTQSPATLSLSPGERATLSCSASQGISNYLNWYQQKPGQAVKLLIYYTSSLHSGIPARFSGSGPGTDYTLTISSLEPEDFAVYYCQQYSKLPRTFGGGTKVEIK

SEQ ID NO: 3027 - protein, 107 aa, Artificial Sequence
  Description of Artificial Sequence: Synthetic polypeptide
DIVMTQTPLSLSVTPGQPASISCSASQGISNYLNWYLQKPGQSVKLLIYYTSSLHSGVPDRFSGSGSGTDYTLKISRVEAEDVGVYYCQQYSKLPRTFGGGTKVEIK

SEQ ID NO: 3028 - protein, 107 aa, Artificial Sequence
  Description of Artificial Sequence: Synthetic polypeptide
DIVMTQTPLSLSVTPGQPASISCSASQGISNYLNWYLQKPGQPVKLLIYYTSSLHSGVPDRFSGSGSGTDYTLKISRVEAEDVGVYYCQQYSKLPRTFGGGTKVEIK

SEQ ID NO: 3029 - protein, 107 aa, Artificial Sequence
  Description of Artificial Sequence: Synthetic polypeptide
DIVMTQSPAFLSVTPGEKVTITCSASQGISNYLNWYQQKPDQAVKLLIYYTSSLHSGVPSRFSGSGSGTDYTFTISSLEAEDAATYYCQQYSKLPRTFGGGTKVEIK

SEQ ID NO: 3030 - protein, 107 aa, Artificial Sequence
  Description of Artificial Sequence: Synthetic polypeptide
DIVMTQSPLSLPVTPGEPASISCSASQGISNYLNWYLQKPGQSVKLLIYYTSSLHSGVPDRFSGSGSGTDYTLKISRVEAEDVGVYYCQQYSKLPRTFGGGTKVEIK

SEQ ID NO: 3031 - protein, 107 aa, Artificial Sequence
  Description of Artificial Sequence: Synthetic polypeptide
DIVMTQTPLSLPVTPGEPASISCSASQGISNYLNWYLQKPGQSVKLLIYYTSSLHSGVPDRFSGSGSGTDYTLKISRVEAEDVGVYYCQQYSKLPRTFGGGTKVEIK

SEQ ID NO: 3032 - protein, 107 aa, Artificial Sequence
  Description of Artificial Sequence: Synthetic polypeptide
EIVMTQSPATLSVSPGERATLSCSASQGISNYLNWYQQKPGQAVKLLIYYTSSLHSGIPARFSGSGSGTEYTLTISILQSEDFAVYYCQQYSKLPRTFGGGTKVEIK

SEQ ID NO: 3033 - protein, 107 aa, Artificial Sequence
  Description of Artificial Sequence: Synthetic polypeptide
EIVMTQSPATLSVSPGERATLSCSASQGISNYLNWYQQKPGQAVKLLIYYTSSLHSGIPARFSGSGSGTEYTLTISSLQSEDFAVYYCQQYSKLPRTFGGGTKVEIK

SEQ ID NO: 3034 - protein, 107 aa, Artificial Sequence
  Description of Artificial Sequence: Synthetic polypeptide
DIVMTQSPLSLPVTLGQPASISCSASQGISNYLNWYQQRPGQSVKRLIYYTSSLHSGVPDRFSGSGSGTDYTLKISRVEAEDVGVYYCQQYSKLPRTFGGGTKVEIK

SEQ ID NO: 3035 - protein, 107 aa, Artificial Sequence
  Description of Artificial Sequence: Synthetic polypeptide
EITMTQSPAFMSATPGDKVNISCSASQGISNYLNWYQQKPGEAVKFIIYYTSSLHSGIPPRFSGSGYGTDYTLTINNIESEDAAYYYCQQYSKLPRTFGGGTKVEIK

SEQ ID NO: 3036 - protein, 107 aa, Artificial Sequence
  Description of Artificial Sequence: Synthetic polypeptide
DIVMTQTPLSSPVTLGQPASISCSASQGISNYLNWYQQRPGQPVKLLIYYTSSLHSGVPDRFSGSGAGTDYTLKISRVEAEDVGVYYCQQYSKLPRTFGGGTKVEIK

SEQ ID NO: 3037 - protein, 107 aa, Artificial Sequence
  Description of Artificial Sequence: Synthetic polypeptide
EIVMTQSPDFQSVTPKEKVTITCSASQGISNYLNWYQQKPDQSVKLLIYYTSSLHSGVPSRFSGSGSGTDYTLTINSLEAEDAATYYCQQYSKLPRTFGGGTKVEIK

SEQ ID NO: 3038 - protein, 107 aa, Artificial Sequence
  Description of Artificial Sequence: Synthetic polypeptide
EIVMTQTPLSLSITPGEQASISCSASQGISNYLNWYLQKARPVVKLLIYYTSSLHSGVPDRFSGSGSGTDYTLKISRVEAEDFGVYYCQQYSKLPRTFGGGTKVEIK

SEQ ID NO: 3039 - protein, 107 aa, Artificial Sequence
  Description of Artificial Sequence: Synthetic polypeptide
EIVMTQTPLSLSITPGEQASMSCSASQGISNYLNWYLQKARPVVKLLIYYTSSLHSGVPDRFSGSGSGTDYTLKISRVEAEDFGVYYCQQYSKLPRTFGGGTKVEIK

SEQ ID NO: 3040 - protein, 120 aa, Artificial Sequence
  Description of Artificial Sequence: Synthetic polypeptide
QVTLKESGPVLVKPTETLTLTCTVSGFSLTAYGVNWVRQPPGKALEWLGMIWGDGNTDYNSALKSRLTISKDNSKSQVVLTMTNMDPVDTATYYCARDRVTATLYAMDYWGQGTLVTVSS

SEQ ID NO: 3041 - protein, 120 aa, Artificial Sequence
  Description of Artificial Sequence: Synthetic polypeptide
QVTLKESGPALVKPTETLTLTCTVSGFSLTAYGVNWVRQPPGKALEWLGMIWGDGNTDYNSALKSRLIISKDNSKSQVVLTMTNMDPVDTATYYCARDRVTATLYAMDYWGQGTLVTVSS

SEQ ID NO: 3042 - protein, 120 aa, Artificial Sequence
  Description of Artificial Sequence: Synthetic polypeptide
QVTLKESGPALVKPTQTLTLTCTVSGFSLTAYGVNWVRQPPGKALEWLGMIWGDGNTDYNSALKSRLTISKDNSKSQVVLTMTNMDPVDTATYYCARDRVTATLYAMDYWGQGTLVTVSS

SEQ ID NO: 3043 - protein, 120 aa, Artificial Sequence
  Description of Artificial Sequence: Synthetic polypeptide
QVQLQESGPGLVKPSGTLSLTCAVSGFSLTAYGVNWVRQPPGKGLEWLGMIWGDGNTDYNSALKSRLTISKDNSKSQVSLKLSSVTAADTAVYYCARDRVTATLYAMDYWGQGTLVTVSS

SEQ ID NO: 3044 - protein, 120 aa, Artificial Sequence
  Description of Artificial Sequence: Synthetic polypeptide
QVTLKESGPTLVKPTQTLTLTCTVSGFSLTAYGVNWVRQPPGKALEWLGMIWGDGNTDYNSALKSRLTITKDNSKSQVVLTMTNMDPVDTATYYCARDRVTATLYAMDYWGQGTLVTVSS

SEQ ID NO: 3045 - protein, 120 aa, Artificial Sequence
  Description of Artificial Sequence: Synthetic polypeptide
QVTLKESGPALVKPTQTLTLTCTVSGFSLTAYGVNWVRQPPGKALEWLGMIWGDGNTDYNSALKSRLTITKDNSKSQVVLTMTNMDPVDTATYYCARDRVTATLYAMDYWGQGTLVTVSS

SEQ ID NO: 3046 - protein, 120 aa, Artificial Sequence
  Description of Artificial Sequence: Synthetic polypeptide
QVQLQESGPGLVKPSQTLSLTCTVSGFSLTAYGVNWVRQPPGKGLEWLGMIWGDGNTDYNSALKSRLTISKDNSKSQVSLKLSSVTAADTAVYYCARDRVTATLYAMDYWGQGTLVTVSS

SEQ ID NO: 3047 - protein, 120 aa, Artificial Sequence
  Description of Artificial Sequence: Synthetic polypeptide
QVQLQESGPGLVKPSETLSLTCTVSGFSLTAYGVNWVRQPPGKGLEWLGMIWGDGNTDYNSALKSRLTISKDNSKSQVSLKLSSVTAADTAVYYCARDRVTATLYAMDYWGQGTLVTVSS

SEQ ID NO: 3048 - protein, 120 aa, Artificial Sequence
  Description of Artificial Sequence: Synthetic polypeptide
QVQLQESGPGLVKPSQTLSLTCAVSGFSLTAYGVNWVRQPPGKGLEWLGMIWGDGNTDYNSALKSRLTISKDNSKSQVSLKLSSVTAADTAVYYCARDRVTATLYAMDYWGQGTLVTVSS

SEQ ID NO: 3049 - protein, 120 aa, Artificial Sequence
  Description of Artificial Sequence: Synthetic polypeptide
QVQLQESGPGLVKPSDTLSLTCTVSGFSLTAYGVNWVRQPPGKGLEWLGMIWGDGNTDYNSALKSRLTISKDNSKSQVSLKLSSVTAADTAVYYCARDRVTATLYAMDYWGQGTLVTVSS

SEQ ID NO: 3050 - protein, 120 aa, Artificial Sequence
  Description of Artificial Sequence: Synthetic polypeptide
QVQLQESGPGLVKPSQTLSLTCTVSGFSLTAYGVNWVRQHPGKGLEWLGMIWGDGNTDYNSALKSRLTISKDNSKSQVSLKLSSVTAADTAVYYCARDRVTATLYAMDYWGQGTLVTVSS

SEQ ID NO: 3051 - protein, 120 aa, Artificial Sequence
  Description of Artificial Sequence: Synthetic polypeptide
QVQLQESGPGLVKPSQTLSLTCTVSGFSLTAYGVNWVRQPAGKGLEWLGMIWGDGNTDYNSALKSRLTISKDNSKSQVSLKLSSVTAADTAVYYCARDRVTATLYAMDYWGQGTLVTVSS

SEQ ID NO: 3052 - protein, 120 aa, Artificial Sequence
  Description of Artificial Sequence: Synthetic polypeptide
QVQLQESGPGLVKPSQTLSLTCAVSGFSLTAYGVNWVRQPPGKGLEWLGMIWGDGNTDYNSALKSRLTISKDNSKSQVSLKLSSVTAVDTAVYYCARDRVTATLYAMDYWGQGTLVTVSS

SEQ ID NO: 3053 - protein, 120 aa, Artificial Sequence
  Description of Artificial Sequence: Synthetic polypeptide
QVQLQESGPGLVKPSETLSLTCTVSGFSLTAYGVNWVRQPPGKGLEWLGMIWGDGNTDYNSALKSRLTISKDNSKSHVSLKLSSVTAADTAVYYCARDRVTATLYAMDYWGQGTLVTVSS

SEQ ID NO: 3054 - protein, 120 aa, Artificial Sequence
  Description of Artificial Sequence: Synthetic polypeptide
QVQLQESGPGLVKPSETLSLTCAVSGFSLTAYGVNWVRQPPGKGLEWLGMIWGDGNTDYNSALKSRLTISKDNSKSQVSLKLSSVTAADTAVYYCARDRVTATLYAMDYWGQGTLVTVSS

SEQ ID NO: 3055 - protein, 120 aa, Artificial Sequence
  Description of Artificial Sequence: Synthetic polypeptide
QVQLQESGPGLVKPSQTLSLTCAVYGFSLTAYGVNWVRQPPGKGLEWLGMIWGDGNTDYNSALKSRLTISKDNSKSQVSLKLSSVTAADTAVYYCARDRVTATLYAMDYWGQGTLVTVSS

SEQ ID NO: 3056 - protein, 120 aa, Artificial Sequence
  Description of Artificial Sequence: Synthetic polypeptide
RVQLQESGPGLVKPSETLSLTCTVSGFSLTAYGVNWVRQPPGKGLEWLGMIWGDGNTDYNSALKSRLTISKDNSKSQVPLKLSSVTAADTAVYYCARDRVTATLYAMDYWGQGTLVTVSS

SEQ ID NO: 3057 - protein, 120 aa, Artificial Sequence
  Description of Artificial Sequence: Synthetic polypeptide
QVQLQESGPGLVKPSQTLSLTCTVSGFSLTAYGVNWVRQHPGKGLEWLGMIWGDGNTDYNSALKSLLTISKDNSKSQVSLKLSSVTAADTAVYYCARDRVTATLYAMDYWGQGTLVTVSS

SEQ ID NO: 3058 - protein, 120 aa, Artificial Sequence
  Description of Artificial Sequence: Synthetic polypeptide
QVQLQESGPGLVKPSDTLSLTCAVSGFSLTAYGVNWVRQPPGKGLEWLGMIWGDGNTDYNSALKSRLTISKDNSKSQVSLKLSSVTALDTAVYYCARDRVTATLYAMDYWGQGTLVTVSS

SEQ ID NO: 3059 - protein, 120 aa, Artificial Sequence
  Description of Artificial Sequence: Synthetic polypeptide
QVQLQESGPGLVKPSDTLSLTCAVSGFSLTAYGVNWVRQPPGKGLEWLGMIWGDGNTDYNSALKSRLTISKDNSKSQVSLKLSSVTAVDTAVYYCARDRVTATLYAMDYWGQGTLVTVSS

SEQ ID NO: 3060 - protein, 120 aa, Artificial Sequence
  Description of Artificial Sequence: Synthetic polypeptide
QVQLQESGSGLVKPSQTLSLTCAVSGFSLTAYGVNWVRQPPGKGLEWLGMIWGDGNTDYNSALKSRLTISKDNSKSQVSLKLSSVTAADTAVYYCARDRVTATLYAMDYWGQGTLVTVSS

SEQ ID NO: 3061 - protein, 120 aa, Artificial Sequence
  Description of Artificial Sequence: Synthetic polypeptide
EVQLVESGGGLVQPGRSLRLSCTVSGFSLTAYGVNWVRQAPGKGLEWLGMIWGDGNTDYNSALKSRLTISKDNSKSIVYLQMNSLKTEDTAVYYCARDRVTATLYAMDYWGQGTLVTVSS

SEQ ID NO: 3062 - protein, 120 aa, Artificial Sequence
  Description of Artificial Sequence: Synthetic polypeptide
EVQLVESGGGLVQPGPSLRLSCTVSGFSLTAYGVNWVRQAPGKGLEWLGMIWGDGNTDYNSALKSRLTISKDNSKSIVYLQMNSLKTEDTAVYYCARDRVTATLYAMDYWGQGTLVTVSS

SEQ ID NO: 3063 - protein, 120 aa, Artificial Sequence
  Description of Artificial Sequence: Synthetic polypeptide
QVQLQESGSGLVKPSQTLSLTCAVSGFSLTAYGVNWVRQSPGKGLEWLGMIWGDGNTDYNSALKSRLTISKDNSKSQVSLKLSSVTAADTAVYYCARDRVTATLYAMDYWGQGTLVTVSS

SEQ ID NO: 3064 - protein, 120 aa, Artificial Sequence
  Description of Artificial Sequence: Synthetic polypeptide
QVQLQESGPGLVKPSETLSLTCTVSGFSLTAYGVNWVRQPAGKGLEWLGMIWGDGNTDYNSALKSRLTISKDNSKSQVSLKLSSVTAADTAVYYCARDRVTATLYAMDYWGQGTLVTVSS

SEQ ID NO: 3065 - protein, 120 aa, Artificial Sequence
  Description of Artificial Sequence: Synthetic polypeptide
EVQLVESGGGLVKPGRSLRLSCTVSGFSLTAYGVNWVRQAPGKGLEWLGMIWGDGNTDYNSALKSRLTISKDNSKSIVYLQMNSLKTEDTAVYYCARDRVTATLYAMDYWGQGTLVTVSS

SEQ ID NO: 3066 - protein, 120 aa, Artificial Sequence
  Description of Artificial Sequence: Synthetic polypeptide
QVQLQESGPGLVKPSETLSLTCAVYGFSLTAYGVNWVRQPPGKGLEWLGMIWGDGNTDYNSALKSRLTISKDNSKSQVYLKLSSVTAADTAVYYCARDRVTATLYAMDYWGQGTLVTVSS

SEQ ID NO: 3067 - protein, 120 aa, Artificial Sequence
  Description of Artificial Sequence: Synthetic polypeptide
QVQLQESGPGLVKPSDTLSLTCAVSGFSLTAYGVNWVRQPPGKGLEWLGMIWGDGNTDYNSALKSRLTISKDNSKSQVSLKLSSVTAVDTGVYYCARDRVTATLYAMDYWGQGTLVTVSS

SEQ ID NO: 3068 - protein, 120 aa, Artificial Sequence
  Description of Artificial Sequence: Synthetic polypeptide
EVQLVESGGGLVQPGGSLRLSCAVSGFSLTAYGVNWVRQAPGKGLEWLGMIWGDGNTDYNSALKSRLTISKDNSKSSVYLQMNSLKTEDTAVYYCARDRVTATLYAMDYWGQGTLVTVSS

SEQ ID NO: 3069 - protein, 120 aa, Artificial Sequence
  Description of Artificial Sequence: Synthetic polypeptide
EVQLVESGGGLVKPGGSLRLSCAVSGFSLTAYGVNWVRQAPGKGLEWLGMIWGDGNTDYNSALKSRLTISKDNSKSTVYLQMNSLKTEDTAVYYCARDRVTATLYAMDYWGQGTLVTVSS

SEQ ID NO: 3070 - protein, 120 aa, Artificial Sequence
  Description of Artificial Sequence: Synthetic polypeptide
QVQLQQSGPGLVKPSQTLSLTCAVSGFSLTAYGVNWVRQSPSRGLEWLGMIWGDGNTDYNSALKSRLTINKDNSKSQVSLQLNSVTPEDTAVYYCARDRVTATLYAMDYWGQGTLVTVSS

SEQ ID NO: 3071 - protein, 120 aa, Artificial Sequence
  Description of Artificial Sequence: Synthetic polypeptide
QVQLVESGGGLVQPGGSLRLSCSVSGFSLTAYGVNWVRQAPGKGLEWLGMIWGDGNTDYNSALKSRLTISKDNSKSTVYLQMNSLRAEDTAVYYCARDRVTATLYAMDYWGQGTLVTVSS

SEQ ID NO: 3072 - protein, 120 aa, Artificial Sequence
  Description of Artificial Sequence: Synthetic polypeptide
QVQLQQWGAGLLKPSETLSLTCAVYGFSLTAYGVNWVRQPPGKGLEWLGMIWGDGNTDYNSALKSRLTISKDNSKSQVSLKLSSVTAADTAVYYCARDRVTATLYAMDYWGQGTLVTVSS

SEQ ID NO: 3073 - protein, 120 aa, Artificial Sequence
  Description of Artificial Sequence: Synthetic polypeptide
QVQLVESGGGVVQPGRSLRLSCAVSGFSLTAYGVNWVRQAPGKGLEWLGMIWGDGNTDYNSALKSRLTISKDNSTSTVFLQMNSLRAEDTAVYYCARDRVTATLYAMDYWGQGTLVTVSS

SEQ ID NO: 3074 - protein, 120 aa, Artificial Sequence
  Description of Artificial Sequence: Synthetic polypeptide
EVQLVESGGGLVQPGGSLRLSCAVSGFSLTAYGVNWVRQAPGKGLEWLGMIWGDGNTDYNSALKSRLTISKDNSKSTVYLQMNSLRAEDTAVYYCARDRVTATLYAMDYWGQGTLVTVSS

SEQ ID NO: 3075 - protein, 120 aa, Artificial Sequence
  Description of Artificial Sequence: Synthetic polypeptide
EVQLVESGGGLVQPGGSLRLSCAVSGFSLTAYGVNWVRQAPGKGLEWLGMIWGDGNTDYNSALKSRLTISKDNAKSSVYLQMNSLRDEDTAVYYCARDRVTATLYAMDYWGQGTLVTVSS

SEQ ID NO: 3076 - protein, 120 aa, Artificial Sequence
  Description of Artificial Sequence: Synthetic polypeptide
EVQLLESGGGLVQPGGSLRLSCAVSGFSLTAYGVNWVRQAPGKGLEWLGMIWGDGNTDYNSALKSRLTISKDNSKSTVYLQMNSLRAEDTAVYYCARDRVTATLYAMDYWGQGTLVTVSS

SEQ ID NO: 3077 - protein, 120 aa, Artificial Sequence
  Description of Artificial Sequence: Synthetic polypeptide
QVQLVESGGGLVKPGGSLRLSCAVSGFSLTAYGVNWVRQAPGKGLEWLGMIWGDGNTDYNSALKSRLTISKDNAKSSVYLQMNSLRAEDTAVYYCARDRVTATLYAMDYWGQGTLVTVSS

SEQ ID NO: 3078 - protein, 120 aa, Artificial Sequence
  Description of Artificial Sequence: Synthetic polypeptide
EVQLVESGGGLVQPGGSLKLSCAVSGFSLTAYGVNWVRQASGKGLEWLGMIWGDGNTDYNSALKSRLTISKDNSKSTVYLQMNSLKTEDTAVYYCARDRVTATLYAMDYWGQGTLVTVSS

SEQ ID NO: 3079 - protein, 120 aa, Artificial Sequence
  Description of Artificial Sequence: Synthetic polypeptide
QVQLLESGGGLVKPGGSLRLSCAVSGFSLTAYGVNWVRQAPGKGLEWLGMIWGDGNTDYNSALKSRLTISKDNAKSSVYLQMNSLRAEDTAVYYCARDRVTATLYAMDYWGQGTLVTVSS

SEQ ID NO: 3080 - protein, 120 aa, Artificial Sequence
  Description of Artificial Sequence: Synthetic polypeptide
QVQLVESGGGVVQPGRSLRLSCAVSGFSLTAYGVNWVRQAPGKGLEWLGMIWGDGNTDYNSALKSRLTISKDNSKSTVYLQMNSLRAEDTAVYYCARDRVTATLYAMDYWGQGTLVTVSS

SEQ ID NO: 3081 - protein, 120 aa, Artificial Sequence
  Description of Artificial Sequence: Synthetic polypeptide
QVQLVESGGGVVQPGRSLRLSCAVSGFSLTAYGVNWVRQAPGKGLEWLGMIWGDGNTDYNSALKSRLTISKDNSKSRVYLQMNSLRAEDTAVYYCARDRVTATLYAMDYWGQGTLVTVSS

SEQ ID NO: 3082 - protein, 120 aa, Artificial Sequence
  Description of Artificial Sequence: Synthetic polypeptide
QVQLVESGGGVVQPGRSLRLSCAVSGFSLTAYGVNWVRQAPGKGLEWLGMIWGDGNTDYNSALKSRLAISKDNSKSTVYLQMNSLRAEDTAVYYCARDRVTATLYAMDYWGQGTLVTVSS

SEQ ID NO: 3083 - protein, 120 aa, Artificial Sequence
  Description of Artificial Sequence: Synthetic polypeptide
QVQLVESGGGVVQPGGSLRLSCAVSGFSLTAYGVNWVRQAPGKGLEWLGMIWGDGNTDYNSALKSRLTISKDNSKSTVYLQMNSLRAEDTAVYYCARDRVTATLYAMDYWGQGTLVTVSS

SEQ ID NO: 3084 - protein, 120 aa, Artificial Sequence
  Description of Artificial Sequence: Synthetic polypeptide
EVQLVESGGGLVQPGGSLRLSCAVSGFSLTAYGVNWVRQAPGKGLEWLGMIWGDGNTDYNSALKSRLTISKDNAKSTVYLQMNSLRAEDTAVYYCARDRVTATLYAMDYWGQGTLVTVSS

SEQ ID NO: 3085 - protein, 120 aa, Artificial Sequence
  Description of Artificial Sequence: Synthetic polypeptide
EVQLVESGGGLVQPGGSLRLSCAVSGFSLTAYGVNWVRQAPGKGLEWLGMIWGDGNTDYNSALKSRLTISKDNAKSSVYLQMNSLRAEDTAVYYCARDRVTATLYAMDYWGQGTLVTVSS

SEQ ID NO: 3086 - protein, 120 aa, Artificial Sequence
  Description of Artificial Sequence: Synthetic polypeptide
EVQLVESGGVVVQPGGSLRLSCAVSGFSLTAYGVNWVRQAPGKGLEWLGMIWGDGNTDYNSALKSRLTISKDNSKSSVYLQMNSLRTEDTALYYCARDRVTATLYAMDYWGQGTLVTVSS

SEQ ID NO: 3087 - protein, 120 aa, Artificial Sequence
  Description of Artificial Sequence: Synthetic polypeptide
EVQLVESGGGLVQPGGSLRLSCAVSGFSLTAYGVNWVRQAPGKGLEWLGMIWGDGNTDYNSALKSRLTISKHNSKSTVYLQMNSLRAEDTAVYYCARDRVTATLYAMDYWGQGTLVTVSS

SEQ ID NO: 3088 - protein, 120 aa, Artificial Sequence
  Description of Artificial Sequence: Synthetic polypeptide
EVQLVESGGGLVKPGGSLRLSCAVSGFSLTAYGVNWVRQAPGKGLEWLGMIWGDGNTDYNSALKSRLTISKDNAKSSVYLQMNSLRAEDTAVYYCARDRVTATLYAMDYWGQGTLVTVSS

SEQ ID NO: 3089 - protein, 120 aa, Artificial Sequence
  Description of Artificial Sequence: Synthetic polypeptide
EVQLVESGGGLIQPGGSLRLSCAVSGFSLTAYGVNWVRQPPGKGLEWLGMIWGDGNTDYNSALKSRLTISKDNSKSTVYLQMNSLRAEDTAVYYCARDRVTATLYAMDYWGQGTLVTVSS

SEQ ID NO: 3090 - skipped

SEQ ID NO: 3091 - protein, 119 aa, Artificial Sequence
  Description of Artificial Sequence: Synthetic polypeptide
QVQLQQSGPELVKPGASVKISCKASGYAFSSSWMNWVKQRPGQGLEWIGRIYPGDGDTKYNGKFKGKATLTADKSSSTAYMHLSSLTSVDSAVYFCARRGTGGWYFDVWGAGTTVTVSS

SEQ ID NO: 3092 - protein, 111 aa, Artificial Sequence
  Description of Artificial Sequence: Synthetic polypeptide
DIVLTQSPASLAVSLGQRATISCRASESVDSSGNSFMHWYQQKPGQPPQLLIYRASNLESGIPARFSGSGSRTDFTLTINPVEADDVATFYCQQSFDDPFTFGSGTKLEIK

SEQ ID NO: 3093 - protein, 111 aa, Artificial Sequence
  Description of Artificial Sequence: Synthetic polypeptide
DIVLTQSPDSLAVSLGERATINCRASESVDSSGNSFMHWYQQKPGQPPQLLIYRASNLESGVPDRFSGSGSRTDFTLTISSLQAEDVAVYYCQQSFDDPFTFGQGTKLEIK

SEQ ID NO: 3094 - protein, 111 aa, Artificial Sequence
  Description of Artificial Sequence: Synthetic polypeptide
EIVLTQSPATLSLSPGERATLSCRASESVDSSGNSFMHWYQQKPGQAPQLLIYRASNLESGIPARFSGSGSRTDFTLTISSLEPEDFAVYYCQQSFDDPFTFGQGTKLEIK

SEQ ID NO: 3095 - protein, 111 aa, Artificial Sequence
  Description of Artificial Sequence: Synthetic polypeptide
EIVLTQSPATLSLSPGERATLSCRASESVDSSGNSFMHWYQQKPGQAPQLLIYRASNLESGIPARFSGSGSRTDFTLTISRLEPEDFAVYYCQQSFDDPFTFGQGTKLEIK

SEQ ID NO: 3096 - protein, 111 aa, Artificial Sequence
  Description of Artificial Sequence: Synthetic polypeptide
EIVLTQSPATLSLSPGERATLSCRASESVDSSGNSFMHWYQQKPGQAPQLLIYRASNLESGIPARFSGSGSRTDFTLTISSLQPEDFAVYYCQQSFDDPFTFGQGTKLEIK

SEQ ID NO: 3097 - protein, 111 aa, Artificial Sequence
  Description of Artificial Sequence: Synthetic polypeptide
DIQLTQSPSSLSASVGDRVTITCRASESVDSSGNSFMHWYQQKPGQAPQLLIYRASNLESGVPSRFSGSGSRTDFTLTISSLQPEDVATYYCQQSFDDPFTFGQGTKLEIK

SEQ ID NO: 3098 - protein, 111 aa, Artificial Sequence
  Description of Artificial Sequence: Synthetic polypeptide
EIVLTQSPATLSLSPGERATLSCRASESVDSSGNSFMHWYQQKPGQAPQLLIYRASNLESGIPARFSGSGPRTDFTLTISSLEPEDFAVYYCQQSFDDPFTFGQGTKLEIK

SEQ ID NO: 3099 - protein, 111 aa, Artificial Sequence
  Description of Artificial Sequence: Synthetic polypeptide
EIVLTQSPATLSLSPGERATLSCRASESVDSSGNSFMHWYQQKPGQAPQLLIYRASNLESGIPDRFSGSGSRTDFTLTISRLEPEDFAVYYCQQSFDDPFTFGQGTKLEIK

SEQ ID NO: 3100 - protein, 111 aa, Artificial Sequence
  Description of Artificial Sequence: Synthetic polypeptide
DIQLTQSPSSLSASVGDRVTITCRASESVDSSGNSFMHWYQQKPGKVPQLLIYRASNLESGVPSRFSGSGSRTDFTLTISSLQPEDVATYYCQQSFDDPFTFGQGTKLEIK

SEQ ID NO: 3101 - protein, 111 aa, Artificial Sequence
  Description of Artificial Sequence: Synthetic polypeptide
DIQLTQSPSSLSASVGDRVTITCRASESVDSSGNSFMHWYQQKPGKTPQLLIYRASNLESGIPSRFSGSGSRTDFTLTIRSLQPEDFATYYCQQSFDDPFTFGQGTKLEIK

SEQ ID NO: 3102 - protein, 111 aa, Artificial Sequence
  Description of Artificial Sequence: Synthetic polypeptide
EIVLTQSPGTLSLSPGERATLSCRASESVDSSGNSFMHWYQQKPGQAPQLLIYRASNLESGIPDRFSGSGSRTDFTLTISRLEPEDFAVYYCQQSFDDPFTFGQGTKLEIK

SEQ ID NO: 3103 - protein, 111 aa, Artificial Sequence
  Description of Artificial Sequence: Synthetic polypeptide
EIVLTQSPATLSLSPGERATLSCRASESVDSSGNSFMHWYQQKPGLAPQLLIYRASNLESGIPDRFSGSGSRTDFTLTISRLEPEDFAVYYCQQSFDDPFTFGQGTKLEIK

SEQ ID NO: 3104 - protein, 111 aa, Artificial Sequence
  Description of Artificial Sequence: Synthetic polypeptide
DIQLTQSPSSLSASVGDRVTITCRASESVDSSGNSFMHWYQQKPGKAPQLLIYRASNLESGVPSRFSGSGSRTDFTLTISSLQPEDFATYYCQQSFDDPFTFGQGTKLEIK

SEQ ID NO: 3105 - protein, 111 aa, Artificial Sequence
  Description of Artificial Sequence: Synthetic polypeptide
DIQLTQSPSSVSASVGDRVTITCRASESVDSSGNSFMHWYQQKPGKAPQLLIYRASNLESGVPSRFSGSGSRTDFTLTISSLQPEDFATYYCQQSFDDPFTFGQGTKLEIK

SEQ ID NO: 3106 - protein, 111 aa, Artificial Sequence
  Description of Artificial Sequence: Synthetic polypeptide
AIQLTQSPSSLSASVGDRVTITCRASESVDSSGNSFMHWYQQKPGKAPQLLIYRASNLESGVPSRFSGSGSRTDFTLTISSLQPEDFATYYCQQSFDDPFTFGQGTKLEIK

SEQ ID NO: 3107 - protein, 111 aa, Artificial Sequence
  Description of Artificial Sequence: Synthetic polypeptide
DIQLTQSPSFLSASVGDRVTITCRASESVDSSGNSFMHWYQQKPGKAPQLLIYRASNLESGVPSRFSGSGSRTEFTLTISSLQPEDFATYYCQQSFDDPFTFGQGTKLEIK

SEQ ID NO: 3108 - protein, 111 aa, Artificial Sequence
  Description of Artificial Sequence: Synthetic polypeptide
DIQLTQSPSSLSASVGDRVTITCRASESVDSSGNSFMHWYQQKPGKAPQLLIYRASNLESGVPSRFSGSGSRTDFTFTISSLQPEDIATYYCQQSFDDPFTFGQGTKLEIK

SEQ ID NO: 3109 - protein, 111 aa, Artificial Sequence
  Description of Artificial Sequence: Synthetic polypeptide
EIVLTQSPATLSVSPGERATLSCRASESVDSSGNSFMHWYQQKPGQAPQLLIYRASNLESGIPARFSGSGSRTEFTLTISILQSEDFAVYYCQQSFDDPFTFGQGTKLEIK

SEQ ID NO: 3110 - protein, 111 aa, Artificial Sequence
  Description of Artificial Sequence: Synthetic polypeptide
EIVLTQSPATLSVSPGERATLSCRASESVDSSGNSFMHWYQQKPGQAPQLLIYRASNLESGIPARFSGSGSRTEFTLTISSLQSEDFAVYYCQQSFDDPFTFGQGTKLEIK

SEQ ID NO: 3111 - protein, 111 aa, Artificial Sequence
  Description of Artificial Sequence: Synthetic polypeptide
AIRLTQSPFSLSASVGDRVTITCRASESVDSSGNSFMHWYQQKPAKAPQLFIYRASNLESGVPSRFSGSGSRTDFTLTISSLQPEDFATYYCQQSFDDPFTFGQGTKLEIK

SEQ ID NO: 3112 - protein, 111 aa, Artificial Sequence
  Description of Artificial Sequence: Synthetic polypeptide
DIQLTQSPSSLSASVGDRVTITCRASESVDSSGNSFMHWYQQKPGKAPQSLIYRASNLESGVPSRFSGSGSRTDFTLTISSLQPEDFATYYCQQSFDDPFTFGQGTKLEIK

SEQ ID NO: 3113 - protein, 111 aa, Artificial Sequence
  Description of Artificial Sequence: Synthetic polypeptide
DIQLTQSPSSLSASVGDRVTITCRASESVDSSGNSFMHWYQQKPGKAPQRLIYRASNLESGVPSRFSGSGSRTEFTLTISNLQPEDFATYYCQQSFDDPFTFGQGTKLEIK

SEQ ID NO: 3114 - protein, 111 aa, Artificial Sequence
  Description of Artificial Sequence: Synthetic polypeptide
DIQLTQSPSTLSASVGDRVTITCRASESVDSSGNSFMHWYQQKPGKAPQLLIYRASNLESGVPSRFSGSGSRTEFTLTISSLQPDDFATYYCQQSFDDPFTFGQGTKLEIK

SEQ ID NO: 3115 - protein, 111 aa, Artificial Sequence
  Description of Artificial Sequence: Synthetic polypeptide
EIVLTQSPDFQSVTPKEKVTITCRASESVDSSGNSFMHWYQQKPDQSPQLLIYRASNLESGVPSRFSGSGSRTDFTLTINSLEAEDAATYYCQQSFDDPFTFGQGTKLEIK

SEQ ID NO: 3116 - protein, 111 aa, Artificial Sequence
  Description of Artificial Sequence: Synthetic polypeptide
DIQLTQSPSSLSASVGDRVTITCRASESVDSSGNSFMHWYQQKPGKAPQSLIYRASNLESGVPSKFSGSGSRTDFTLTISSLQPEDFATYYCQQSFDDPFTFGQGTKLEIK

SEQ ID NO: 3117 - protein, 111 aa, Artificial Sequence
  Description of Artificial Sequence: Synthetic polypeptide
DIQLTQSPSSLSASVGDRVTITCRASESVDSSGNSFMHWYQQKPGKAPQRLIYRASNLESGVPSRFSGSGSRTEFTLTISSLQPEDFATYYCQQSFDDPFTFGQGTKLEIK

SEQ ID NO: 3118 - protein, 111 aa, Artificial Sequence
  Description of Artificial Sequence: Synthetic polypeptide
DIVLTQTPLSLSVTPGQPASISCRASESVDSSGNSFMHWYLQKPGQPPQLLIYRASNLESGVPDRFSGSGSRTDFTLKISRVEAEDVGVYYCQQSFDDPFTFGQGTKLEIK

SEQ ID NO: 3119 - protein, 111 aa, Artificial Sequence
  Description of Artificial Sequence: Synthetic polypeptide
DIQLTQSPSSLSASVGDRVTITCRASESVDSSGNSFMHWYQQKPEKAPQSLIYRASNLESGVPSRFSGSGSRTDFTLTISSLQPEDFATYYCQQSFDDPFTFGQGTKLEIK

SEQ ID NO: 3120 - protein, 111 aa, Artificial Sequence
  Description of Artificial Sequence: Synthetic polypeptide
EIVLTQSPPTLSLSPGERVTLSCRASESVDSSGNSFMHWYQQKPGQAPQLLIYRASNLESGIPARFSGSGSRTDFTLTISSLQPEDFAVYYCQQSFDDPFTFGQGTKLEIK

SEQ ID NO: 3121 - protein, 111 aa, Artificial Sequence
  Description of Artificial Sequence: Synthetic polypeptide
DIQLTQSPSAMSASVGDRVTITCRASESVDSSGNSFMHWYQQKPGKVPQRLIYRASNLESGVPSRFSGSGSRTEFTLTISSLQPEDFATYYCQQSFDDPFTFGQGTKLEIK

SEQ ID NO: 3122 - protein, 111 aa, Artificial Sequence
  Description of Artificial Sequence: Synthetic polypeptide
DIVLTQSPLSLPVTPGEPASISCRASESVDSSGNSFMHWYLQKPGQSPQLLIYRASNLESGVPDRFSGSGSRTDFTLKISRVEAEDVGVYYCQQSFDDPFTFGQGTKLEIK

SEQ ID NO: 3123 - protein, 111 aa, Artificial Sequence
  Description of Artificial Sequence: Synthetic polypeptide
DIVLTQTPLSLPVTPGEPASISCRASESVDSSGNSFMHWYLQKPGQSPQLLIYRASNLESGVPDRFSGSGSRTDFTLKISRVEAEDVGVYYCQQSFDDPFTFGQGTKLEIK

SEQ ID NO: 3124 - protein, 111 aa, Artificial Sequence
  Description of Artificial Sequence: Synthetic polypeptide
DIVLTQTPLSLSVTPGQPASISCRASESVDSSGNSFMHWYLQKPGQSPQLLIYRASNLESGVPDRFSGSGSRTDFTLKISRVEAEDVGVYYCQQSFDDPFTFGQGTKLEIK

SEQ ID NO: 3125 - protein, 111 aa, Artificial Sequence
  Description of Artificial Sequence: Synthetic polypeptide
EIVLTQSPPTLSLSPGERVTLSCRASESVDSSGNSFMHWYQQKPGQAPQLLIYRASNLESSIPARFSGSGSRTDFTLTISSLQPEDFAVYYCQQSFDDPFTFGQGTKLEIK

SEQ ID NO: 3126 - protein, 111 aa, Artificial Sequence
  Description of Artificial Sequence: Synthetic polypeptide
DIVLTQSPLSLPVTLGQPASISCRASESVDSSGNSFMHWYQQRPGQSPQRLIYRASNLESGVPDRFSGSGSRTDFTLKISRVEAEDVGVYYCQQSFDDPFTFGQGTKLEIK

SEQ ID NO: 3127 - protein, 111 aa, Artificial Sequence
  Description of Artificial Sequence: Synthetic polypeptide
DIVLTQTPLSSPVTLGQPASISCRASESVDSSGNSFMHWYQQRPGQPPQLLIYRASNLESGVPDRFSGSGARTDFTLKISRVEAEDVGVYYCQQSFDDPFTFGQGTKLEIK

SEQ ID NO: 3128 - protein, 111 aa, Artificial Sequence
  Description of Artificial Sequence: Synthetic polypeptide
DIVLTQSPAFLSVTPGEKVTITCRASESVDSSGNSFMHWYQQKPDQAPQLLIYRASNLESGVPSRFSGSGSRTDFTFTISSLEAEDAATYYCQQSFDDPFTFGQGTKLEIK

SEQ ID NO: 3129 - protein, 111 aa, Artificial Sequence
  Description of Artificial Sequence: Synthetic polypeptide
DIQLIQSPSFLSASVGDRVSIICRASESVDSSGNSFMHWYLQKPGKSPQLFIYRASNLESGVSSRFSGRGSRTDFTLTIISLKPEDFAAYYCQQSFDDPFTFGQGTKLEIK

SEQ ID NO: 3130 - protein, 111 aa, Artificial Sequence
  Description of Artificial Sequence: Synthetic polypeptide
EIVLTQTPLSLSITPGEQASISCRASESVDSSGNSFMHWYLQKARPVPQLLIYRASNLESGVPDRFSGSGSRTDFTLKISRVEAEDFGVYYCQQSFDDPFTFGQGTKLEIK

SEQ ID NO: 3131 - protein, 111 aa, Artificial Sequence
  Description of Artificial Sequence: Synthetic polypeptide
EIVLTQTPLSLSITPGEQASMSCRASESVDSSGNSFMHWYLQKARPVPQLLIYRASNLESGVPDRFSGSGSRTDFTLKISRVEAEDFGVYYCQQSFDDPFTFGQGTKLEIK

SEQ ID NO: 3132 - protein, 111 aa, Artificial Sequence
  Description of Artificial Sequence: Synthetic polypeptide
EITLTQSPAFMSATPGDKVNISCRASESVDSSGNSFMHWYQQKPGEAPQFIIYRASNLESGIPPRFSGSGYRTDFTLTINNIESEDAAYYYCQQSFDDPFTFGQGTKLEIK

SEQ ID NO: 3133 - protein, 119 aa, Artificial Sequence
  Description of Artificial Sequence: Synthetic polypeptide
QVQLVQSGAEVKKPGASVKVSCKASGYAFSSSWMNWVRQAPGQGLEWIGRIYPGDGDTKYNGKFKGRATLTADKSTSTAYMELSSLRSEDTAVYYCARRGTGGWYFDVWGQGTTVTVSS

SEQ ID NO: 3134 - protein, 119 aa, Artificial Sequence
  Description of Artificial Sequence: Synthetic polypeptide
QVQLVQSGAEVKKPGSSVKVSCKASGYAFSSSWMNWVRQAPGQGLEWIGRIYPGDGDTKYNGKFKGRATLTADKSTSTAYMELSSLRSEDTAVYYCARRGTGGWYFDVWGQGTTVTVSS

SEQ ID NO: 3135 - protein, 119 aa, Artificial Sequence
  Description of Artificial Sequence: Synthetic polypeptide
QVQLVQSGAEVKKPGASVKVSCKASGYAFSSSWMNWVRQAPGKGLEWIGRIYPGDGDTKYNGKFKGRATLTADKSTSTAYMELSSLRSEDTAVYYCARRGTGGWYFDVWGQGTTVTVSS

SEQ ID NO: 3136 - protein, 119 aa, Artificial Sequence
  Description of Artificial Sequence: Synthetic polypeptide
QVQLVQSGAEVKKPGASVKVSCKASGYAFSSSWMNWVRQAPGQELEWIGRIYPGDGDTKYNGKFKGRATLTADKSISTAYMELSSLRSEDTATYYCARRGTGGWYFDVWGQGTTVTVSS

SEQ ID NO: 3137 - protein, 119 aa, Artificial Sequence
  Description of Artificial Sequence: Synthetic polypeptide
EVQLVQSGAEVKKPGATVKISCKASGYAFSSSWMNWVQQAPGKGLEWIGRIYPGDGDTKYNGKFKGRATLTADKSTSTAYMELSSLRSEDTAVYYCARRGTGGWYFDVWGQGTTVTVSS

SEQ ID NO: 3138 - protein, 119 aa, Artificial Sequence
  Description of Artificial Sequence: Synthetic polypeptide
QVQLVQSGAEVKKTGSSVKVSCKASGYAFSSSWMNWVRQAPGQALEWIGRIYPGDGDTKYNGKFKGRATLTADKSMSTAYMELSSLRSEDTAMYYCARRGTGGWYFDVWGQGTTVTVSS

SEQ ID NO: 3139 - protein, 119 aa, Artificial Sequence
  Description of Artificial Sequence: Synthetic polypeptide
QVQLVQSGAEVKKPGASVKVSCKASGYAFSSSWMNWVRQAPGQRLEWIGRIYPGDGDTKYNGKFKGRATLTADKSASTAYMELSSLRSEDMAVYYCARRGTGGWYFDVWGQGTTVTVSS

SEQ ID NO: 3140 - protein, 119 aa, Artificial Sequence
  Description of Artificial Sequence: Synthetic polypeptide
QVQLVQSGAEVKKPGASVKVSCKASGYAFSSSWMNWVRQAPGQGLEWIGRIYPGDGDTKYNGKFKGRATLTADKSTSTAYMELRSLRSDDMAVYYCARRGTGGWYFDVWGQGTTVTVSS

SEQ ID NO: 3141 - protein, 119 aa, Artificial Sequence
  Description of Artificial Sequence: Synthetic polypeptide
QVQLVQSGAEVKKPGASVKVSCKASGYAFSSSWMNWVRQAPGQRLEWIGRIYPGDGDTKYNGKFKGRATLTADKSASTAYMELSSLRSEDTAVYYCARRGTGGWYFDVWGQGTTVTVSS

SEQ ID NO: 3142 - protein, 119 aa, Artificial Sequence
  Description of Artificial Sequence: Synthetic polypeptide
QVQLVQSGAEVKKPGASVKVSCKASGYAFSSSWMNWVRQAPGQGLEWIGRIYPGDGDTKYNGKFKGRATLTADKSTSTAYMELRSLRSDDTAVYYCARRGTGGWYFDVWGQGTTVTVSS

SEQ ID NO: 3143 - protein, 119 aa, Artificial Sequence
  Description of Artificial Sequence: Synthetic polypeptide
QVQLVQSGAEVKKPGASVKVSCKASGYAFSSSWMNWVRQAPGQGLEWIGRIYPGDGDTKYNGKFKGRATLTADKSISTAYMELSRLRSDDTAVYYCARRGTGGWYFDVWGQGTTVTVSS

SEQ ID NO: 3144 - protein, 119 aa, Artificial Sequence
  Description of Artificial Sequence: Synthetic polypeptide
QVQLVQSGAEVKKPGASVKVSCKASGYAFSSSWMNWVRQAPGQGLEWIGRIYPGDGDTKYNGKFKGRATLTADKSISTAYMELSRLRSDDTVVYYCARRGTGGWYFDVWGQGTTVTVSS

SEQ ID NO: 3145 - protein, 119 aa, Artificial Sequence
  Description of Artificial Sequence: Synthetic polypeptide
QVQLVQSGAEVKKPGASVKVSCKASGYAFSSSWMNWVRQAPGQGLEWIGRIYPGDGDTKYNGKFKGWATLTADKSISTAYMELSRLRSDDTAVYYCARRGTGGWYFDVWGQGTTVTVSS

SEQ ID NO: 3146 - protein, 119 aa, Artificial Sequence
  Description of Artificial Sequence: Synthetic polypeptide
QVQLVQSGAEVKKPGASVKVSCKASGYAFSSSWMNWVRQATGQGLEWIGRIYPGDGDTKYNGKFKGRATLTANKSISTAYMELSSLRSEDTAVYYCARRGTGGWYFDVWGQGTTVTVSS

SEQ ID NO: 3147 - protein, 119 aa, Artificial Sequence
  Description of Artificial Sequence: Synthetic polypeptide
QVQLVQSGSELKKPGASVKVSCKASGYAFSSSWMNWVRQAPGQGLEWIGRIYPGDGDTKYNGKFKGRAVLSADKSVSTAYLQISSLKAEDTAVYYCARRGTGGWYFDVWGQGTTVTVSS

SEQ ID NO: 3148 - protein, 119 aa, Artificial Sequence
  Description of Artificial Sequence: Synthetic polypeptide
QVQLVQSGPEVKKPGTSVKVSCKASGYAFSSSWMNWVRQARGQRLEWIGRIYPGDGDTKYNGKFKGRATLTADKSTSTAYMELSSLRSEDTAVYYCARRGTGGWYFDVWGQGTTVTVSS

SEQ ID NO: 3149 - protein, 119 aa, Artificial Sequence
  Description of Artificial Sequence: Synthetic polypeptide
EVQLVQSGAEVKKPGESLKISCKASGYAFSSSWMNWVRQMPGKGLEWIGRIYPGDGDTKYNGKFKGQATLSADKSISTAYLQWSSLKASDTAMYYCARRGTGGWYFDVWGQGTTVTVSS

SEQ ID NO: 3150 - protein, 119 aa, Artificial Sequence
  Description of Artificial Sequence: Synthetic polypeptide
QVQLVQSGSELKKPGASVKVSCKASGYAFSSSWMNWVRQAPGQGLEWIGRIYPGDGDTKYNGKFKGRAVLSADKSVSMAYLQISSLKAEDTAVYYCARRGTGGWYFDVWGQGTTVTVSS

SEQ ID NO: 3151 - protein, 119 aa, Artificial Sequence
  Description of Artificial Sequence: Synthetic polypeptide
QVQLVQSGHEVKQPGASVKVSCKASGYAFSSSWMNWVPQAPGQGLEWIGRIYPGDGDTKYNGKFKGRAVLSADKSASTAYLQISSLKAEDMAMYYCARRGTGGWYFDVWGQGTTVTVSS

SEQ ID NO: 3152 - protein, 119 aa, Artificial Sequence
  Description of Artificial Sequence: Synthetic polypeptide
EVQLVQSGAEVKKPGESLKISCKASGYAFSSSWMNWVRQMPGKGLEWIGRIYPGDGDTKYNGKFKGQATLSADKPISTAYLQWSSLKASDTAMYYCARRGTGGWYFDVWGQGTTVTVSS

SEQ ID NO: 3153 - protein, 119 aa, Artificial Sequence
  Description of Artificial Sequence: Synthetic polypeptide
EVQLVQSGAEVKKPGESLRISCKASGYAFSSSWMNWVRQMPGKGLEWIGRIYPGDGDTKYNGKFKGQATLSADKSISTAYLQWSSLKASDTAMYYCARRGTGGWYFDVWGQGTTVTVSS

SEQ ID NO: 3154 - protein, 119 aa, Artificial Sequence
  Description of Artificial Sequence: Synthetic polypeptide
EVQLVQSGAEVKKPGESLRISCKASGYAFSSSWMNWVRQMPGKGLEWIGRIYPGDGDTKYNGKFKGHATLSADKSISTAYLQWSSLKASDTAMYYCARRGTGGWYFDVWGQGTTVTVSS

SEQ ID NO: 3155 - protein, 119 aa, Artificial Sequence
  Description of Artificial Sequence: Synthetic polypeptide
QVQLVQSGAEVKKTGSSVKVSCKASGYAFSSSWMNWVRQAPRQALEWIGRIYPGDGDTKYNGKFKGRATLTADKSMSTAYMELSSLRSEDTAMYYCARRGTGGWYFDVWGQGTTVTVSS

SEQ ID NO: 3156 - protein, 119 aa, Artificial Sequence
  Description of Artificial Sequence: Synthetic polypeptide
EVQLVESGGGLVQPGRSLRLSCTASGYAFSSSWMNWVRQAPGKGLEWIGRIYPGDGDTKYNGKFKGRATLSADKSKSIAYLQMNSLKTEDTAVYYCARRGTGGWYFDVWGQGTTVTVSS

SEQ ID NO: 3157 - protein, 119 aa, Artificial Sequence
  Description of Artificial Sequence: Synthetic polypeptide
EVQLVESGGGLVQPGPSLRLSCTASGYAFSSSWMNWVRQAPGKGLEWIGRIYPGDGDTKYNGKFKGRATLSADKSKSIAYLQMNSLKTEDTAVYYCARRGTGGWYFDVWGQGTTVTVSS

SEQ ID NO: 3158 - protein, 119 aa, Artificial Sequence
  Description of Artificial Sequence: Synthetic polypeptide
QVQLQESGPGLVKPSQTLSLTCTASGYAFSSSWMNWVRQPPGKGLEWIGRIYPGDGDTKYNGKFKGRATLSADKSKSQASLKLSSVTAADTAVYYCARRGTGGWYFDVWGQGTTVTVSS

SEQ ID NO: 3159 - protein, 119 aa, Artificial Sequence
  Description of Artificial Sequence: Synthetic polypeptide
QVQLQESGPGLVKPSGTLSLTCAASGYAFSSSWMNWVRQPPGKGLEWIGRIYPGDGDTKYNGKFKGRATLSADKSKSQASLKLSSVTAADTAVYYCARRGTGGWYFDVWGQGTTVTVSS

SEQ ID NO: 3160 - protein, 119 aa, Artificial Sequence
  Description of Artificial Sequence: Synthetic polypeptide
EVQLVESGGGLVKPGRSLRLSCTASGYAFSSSWMNWVRQAPGKGLEWIGRIYPGDGDTKYNGKFKGRATLSADKSKSIAYLQMNSLKTEDTAVYYCARRGTGGWYFDVWGQGTTVTVSS

SEQ ID NO: 3161 - protein, 119 aa, Artificial Sequence
  Description of Artificial Sequence: Synthetic polypeptide
EVQLVESGGGLVQPGGSLKLSCAASGYAFSSSWMNWVRQASGKGLEWIGRIYPGDGDTKYNGKFKGRATLSADKSKSTAYLQMNSLKTEDTAVYYCARRGTGGWYFDVWGQGTTVTVSS

SEQ ID NO: 3162 - protein, 119 aa, Artificial Sequence
  Description of Artificial Sequence: Synthetic polypeptide
QVQLQESGPGLVKPSQTLSLTCAASGYAFSSSWMNWVRQPPGKGLEWIGRIYPGDGDTKYNGKFKGRATLSADKSKSQASLKLSSVTAADTAVYYCARRGTGGWYFDVWGQGTTVTVSS

SEQ ID NO: 3163 - protein, 119 aa, Artificial Sequence
  Description of Artificial Sequence: Synthetic polypeptide
EVQLVESGGGLVKPGGSLRLSCAASGYAFSSSWMNWVRQAPGKGLEWIGRIYPGDGDTKYNGKFKGRATLSADKSKSTAYLQMNSLKTEDTAVYYCARRGTGGWYFDVWGQGTTVTVSS

SEQ ID NO: 3164 - protein, 119 aa, Artificial Sequence
  Description of Artificial Sequence: Synthetic polypeptide
EVQLVESGGALVKPGGSLRLSCAASGYAFSSSWMNWVRQAPGKGLEWIGRIYPGDGDTKYNGKFKGRATLSADKSKSTAYLQMNSLKTEDTAVYYCARRGTGGWYFDVWGQGTTVTVSS

SEQ ID NO: 3165 - protein, 119 aa, Artificial Sequence
  Description of Artificial Sequence: Synthetic polypeptide
QVQLQESGPGLVKPSQTLSLTCAAYGYAFSSSWMNWVRQPPGKGLEWIGRIYPGDGDTKYNGKFKGRATLSADKSKSQASLKLSSVTAADTAVYYCARRGTGGWYFDVWGQGTTVTVSS

SEQ ID NO: 3166 - protein, 119 aa, Artificial Sequence
  Description of Artificial Sequence: Synthetic polypeptide
QVQLQESGSGLVKPSQTLSLTCAASGYAFSSSWMNWVRQPPGKGLEWIGRIYPGDGDTKYNGKFKGRATLSADKSKSQASLKLSSVTAADTAVYYCARRGTGGWYFDVWGQGTTVTVSS

SEQ ID NO: 3167 - protein, 119 aa, Artificial Sequence
  Description of Artificial Sequence: Synthetic polypeptide
EVQLVESGGGLVQPGGSLRLSCAASGYAFSSSWMNWVRQAPGKGLEWIGRIYPGDGDTKYNGKFKGRATLSADKSKSSAYLQMNSLKTEDTAVYYCARRGTGGWYFDVWGQGTTVTVSS

SEQ ID NO: 3168 - protein, 119 aa, Artificial Sequence
  Description of Artificial Sequence: Synthetic polypeptide
QVQLQESGPGLVKPSDTLSLTCTASGYAFSSSWMNWVRQPPGKGLEWIGRIYPGDGDTKYNGKFKGRATLSADKSKSQASLKLSSVTAADTAVYYCARRGTGGWYFDVWGQGTTVTVSS

SEQ ID NO: 3169 - protein, 119 aa, Artificial Sequence
  Description of Artificial Sequence: Synthetic polypeptide
QVQLQESGPGLVKPSQTLSLTCTASGYAFSSSWMNWVRQHPGKGLEWIGRIYPGDGDTKYNGKFKGRATLSADKSKSQASLKLSSVTAADTAVYYCARRGTGGWYFDVWGQGTTVTVSS

SEQ ID NO: 3170 - protein, 119 aa, Artificial Sequence
  Description of Artificial Sequence: Synthetic polypeptide
QVQLQESGPGLVKPSQTLSLTCTASGYAFSSSWMNWVRQHPGKGLEWIGRIYPGDGDTKYNGKFKGLATLSADKSKSQASLKLSSVTAADTAVYYCARRGTGGWYFDVWGQGTTVTVSS

SEQ ID NO: 3171 - protein, 119 aa, Artificial Sequence
  Description of Artificial Sequence: Synthetic polypeptide
QVQLVESGGGVVQPGRSLRLSCAASGYAFSSSWMNWVRQAPGKGLEWIGRIYPGDGDTKYNGKFKGRATLSADKSKSTAYLQMSSLRAEDTAVYYCARRGTGGWYFDVWGQGTTVTVSS

SEQ ID NO: 3172 - protein, 119 aa, Artificial Sequence
  Description of Artificial Sequence: Synthetic polypeptide
QVQLVESGGGLVKPGGSLRLSCAASGYAFSSSWMNWVRQAPGKGLEWIGRIYPGDGDTKYNGKFKGRATLSADKAKSSAYLQMNSLRAEDTAVYYCARRGTGGWYFDVWGQGTTVTVSS

SEQ ID NO: 3173 - protein, 119 aa, Artificial Sequence
  Description of Artificial Sequence: Synthetic polypeptide
QVQLVESGGGLVQPGGSLRLSCSASGYAFSSSWMNWVRQAPGKGLEWIGRIYPGDGDTKYNGKFKGRATLSADKSKSTAYLQMNSLRAEDTAVYYCARRGTGGWYFDVWGQGTTVTVSS

SEQ ID NO: 3174 - protein, 119 aa, Artificial Sequence
  Description of Artificial Sequence: Synthetic polypeptide
QVQLLESGGGLVKPGGSLRLSCAASGYAFSSSWMNWVRQAPGKGLEWIGRIYPGDGDTKYNGKFKGRATLSADKAKSSAYLQMNSLRAEDTAVYYCARRGTGGWYFDVWGQGTTVTVSS

SEQ ID NO: 3175 - protein, 119 aa, Artificial Sequence
  Description of Artificial Sequence: Synthetic polypeptide
EVQLVESGGGLVQPGGSLRLSCSASGYAFSSSWMNWVRQAPGKGLEWIGRIYPGDGDTKYNGKFKGRATLSADKSKSTAYLQMSSLRAEDTAVYYCARRGTGGWYFDVWGQGTTVTVSS

SEQ ID NO: 3176 - protein, 119 aa, Artificial Sequence
  Description of Artificial Sequence: Synthetic polypeptide
QVQLQESGPGLVKPSDTLSLTCAASGYAFSSSWMNWVRQPPGKGLEWIGRIYPGDGDTKYNGKFKGRATLSADKSKSQASLKLSSVTAVDTAVYYCARRGTGGWYFDVWGQGTTVTVSS

SEQ ID NO: 3177 - protein, 119 aa, Artificial Sequence
  Description of Artificial Sequence: Synthetic polypeptide
QVQLQESGPGLVKPSQTLSLTCAASGYAFSSSWMNWVRQPPGKGLEWIGRIYPGDGDTKYNGKFKGRATLSADKSKSQASLKLSSVTAVDTAVYYCARRGTGGWYFDVWGQGTTVTVSS

SEQ ID NO: 3178 - protein, 119 aa, Artificial Sequence
  Description of Artificial Sequence: Synthetic polypeptide
EVQLVESGGGLVQPGGSLRLSCSASGYAFSSSWMNWVRQAPGKGLEWIGRIYPGDGDTKYNGKFKGRATLSADKSKSTAYVQMSSLRAEDTAVYYCARRGTGGWYFDVWGQGTTVTVSS

SEQ ID NO: 3179 - protein, 119 aa, Artificial Sequence
  Description of Artificial Sequence: Synthetic polypeptide
QVQLVDSGGGVVQPGRSLRLSCAASGYAFSSSWMNWVRQAPGKGLEWIGRIYPGDGDTKYNGKFKGRATLSADKSKSTAYLQMNSLRAEDTAVYYCARRGTGGWYFDVWGQGTTVTVSS

SEQ ID NO: 3180 - protein, 119 aa, Artificial Sequence
  Description of Artificial Sequence: Synthetic polypeptide
QVQLVESGGGVVQPGRSLRLSCAASGYAFSSSWMNWVRQAPGKGLEWIGRIYPGDGDTKYNGKFKGRATLSADKSKSTAYLQMNSLRAEGTAVYYCARRGTGGWYFDVWGQGTTVTVSS

SEQ ID NO: 3181 - protein, 119 aa, Artificial Sequence
  Description of Artificial Sequence: Synthetic polypeptide
QVQLVESGGGVVQPGRSLRLSCAASGYAFSSSWMNWVRQAPGKGLEWIGRIYPGDGDTKYNGKFKGRATLSADKSKSTAYLQMNSLRAEDTAVYYCARRGTGGWYFDVWGQGTTVTVSS

SEQ ID NO: 3182 - protein, 119 aa, Artificial Sequence
  Description of Artificial Sequence: Synthetic polypeptide
EVQLVESGGGLVQPGGSLRLSCAASGYAFSSSWMNWVRQAPGKGLEWIGRIYPGDGDTKYNGKFKGRATLSADKSKSTAYLQMNSLRAEDTAVYYCARRGTGGWYFDVWGQGTTVTVSS

SEQ ID NO: 3183 - protein, 117 aa, Artificial Sequence
  Description of Artificial Sequence: Synthetic polypeptide
EVQLVESGGDLVKPGGSLKLSCAVSGFTFRSYGMSWVRQTPDKRLEWVALISSGGSYTYYTDSVKGRFTISRDNAKNTLYLQMSSLKSEDTAIYYCSRHGGNFFDYWGQGTTLTVSS

SEQ ID NO: 3184 - protein, 107 aa, Artificial Sequence
  Description of Artificial Sequence: Synthetic polypeptide
QIVLTQSPSIMSASPGEKVTMTCSVSSSVSYMHWYQQKSGTSPKRWIYDTSKLASGVPARFSGSGSGTSYSLTISSMEAEDAATYYCQQWSSNPQYTFGGGTKLEIK

SEQ ID NO: 3185 - protein, 107 aa, Artificial Sequence
  Description of Artificial Sequence: Synthetic polypeptide
DIVLTQSPAFLSVTPGEKVTITCSVSSSVSYMHWYQQKPDQAPKLLIYDTSKLASGVPSRFSGSGSGTDYTFTISSLEAEDAATYYCQQWSSNPQYTFGQGTKLEIK

SEQ ID NO: 3186 - protein, 107 aa, Artificial Sequence
  Description of Artificial Sequence: Synthetic polypeptide
AIQLTQSPSSLSASVGDRVTITCSVSSSVSYMHWYQQKPGKAPKLLIYDTSKLASGVPSRFSGSGSGTDYTLTISSLQPEDFATYYCQQWSSNPQYTFGQGTKLEIK

SEQ ID NO: 3187 - protein, 107 aa, Artificial Sequence
  Description of Artificial Sequence: Synthetic polypeptide
DIQLTQSPSFLSASVGDRVTITCSVSSSVSYMHWYQQKPGKAPKLLIYDTSKLASGVPSRFSGSGSGTEYTLTISSLQPEDFATYYCQQWSSNPQYTFGQGTKLEIK

SEQ ID NO: 3188 - protein, 107 aa, Artificial Sequence
  Description of Artificial Sequence: Synthetic polypeptide
DIQLTQSPSSLSASVGDRVTITCSVSSSVSYMHWYQQKPGKAPKLLIYDTSKLASGVPSRFSGSGSGTDYTLTISSLQPEDFATYYCQQWSSNPQYTFGQGTKLEIK

SEQ ID NO: 3189 - protein, 107 aa, Artificial Sequence
  Description of Artificial Sequence: Synthetic polypeptide
DIQLTQSPSSVSASVGDRVTITCSVSSSVSYMHWYQQKPGKAPKLLIYDTSKLASGVPSRFSGSGSGTDYTLTISSLQPEDFATYYCQQWSSNPQYTFGQGTKLEIK

SEQ ID NO: 3190 - protein, 107 aa, Artificial Sequence
  Description of Artificial Sequence: Synthetic polypeptide
DIQLTQSPSSLSASVGDRVTITCSVSSSVSYMHWYQQKPGKVPKLLIYDTSKLASGVPSRFSGSGSGTDYTLTISSLQPEDVATYYCQQWSSNPQYTFGQGTKLEIK

SEQ ID NO: 3191 - protein, 107 aa, Artificial Sequence
  Description of Artificial Sequence: Synthetic polypeptide
DIQLTQSPSSLSASVGDRVTITCSVSSSVSYMHWYQQKPGQAPKLLIYDTSKLASGVPSRFSGSGSGTDYTLTISSLQPEDVATYYCQQWSSNPQYTFGQGTKLEIK

SEQ ID NO: 3192 - protein, 107 aa, Artificial Sequence
  Description of Artificial Sequence: Synthetic polypeptide
EIVLTQSPDFQSVTPKEKVTITCSVSSSVSYMHWYQQKPDQSPKLLIYDTSKLASGVPSRFSGSGSGTDYTLTINSLEAEDAATYYCQQWSSNPQYTFGQGTKLEIK

SEQ ID NO: 3193 - protein, 107 aa, Artificial Sequence
  Description of Artificial Sequence: Synthetic polypeptide
AIRLTQSPFSLSASVGDRVTITCSVSSSVSYMHWYQQKPAKAPKLFIYDTSKLASGVPSRFSGSGSGTDYTLTISSLQPEDFATYYCQQWSSNPQYTFGQGTKLEIK

SEQ ID NO: 3194 - protein, 107 aa, Artificial Sequence
  Description of Artificial Sequence: Synthetic polypeptide
DIQLTQSPSSLSASVGDRVTITCSVSSSVSYMHWYQQKPGKAPKLLIYDTSKLASGVPSRFSGSGSGTDYTFTISSLQPEDIATYYCQQWSSNPQYTFGQGTKLEIK

SEQ ID NO: 3195 - protein, 107 aa, Artificial Sequence
  Description of Artificial Sequence: Synthetic polypeptide
EIVLTQSPATLSLSPGERATLSCSVSSSVSYMHWYQQKPGQAPKLLIYDTSKLASGIPARFSGSGSGTDYTLTISSLEPEDFAVYYCQQWSSNPQYTFGQGTKLEIK

SEQ ID NO: 3196 - protein, 107 aa, Artificial Sequence
  Description of Artificial Sequence: Synthetic polypeptide
DIQLTQSPSTLSASVGDRVTITCSVSSSVSYMHWYQQKPGKAPKLLIYDTSKLASGVPSRFSGSGSGTEYTLTISSLQPDDFATYYCQQWSSNPQYTFGQGTKLEIK

SEQ ID NO: 3197 - protein, 107 aa, Artificial Sequence
  Description of Artificial Sequence: Synthetic polypeptide
DIQLTQSPSSLSASVGDRVTITCSVSSSVSYMHWYQQKPGKTPKLLIYDTSKLASGIPSRFSGSGSGTDYTLTIRSLQPEDFATYYCQQWSSNPQYTFGQGTKLEIK

SEQ ID NO: 3198 - protein, 107 aa, Artificial Sequence
  Description of Artificial Sequence: Synthetic polypeptide
EIVLTQSPPTLSLSPGERVTLSCSVSSSVSYMHWYQQKPGQAPKLLIYDTSKLASGIPARFSGSGSGTDYTLTISSLQPEDFAVYYCQQWSSNPQYTFGQGTKLEIK

SEQ ID NO: 3199 - protein, 107 aa, Artificial Sequence
  Description of Artificial Sequence: Synthetic polypeptide
DIQLTQSPSSLSASVGDRVTITCSVSSSVSYMHWYQQKPGKAPKRLIYDTSKLASGVPSRFSGSGSGTEYTLTISSLQPEDFATYYCQQWSSNPQYTFGQGTKLEIK

SEQ ID NO: 3200 - protein, 107 aa, Artificial Sequence
  Description of Artificial Sequence: Synthetic polypeptide
EIVLTQSPATLSLSPGERATLSCSVSSSVSYMHWYQQKPGQAPKLLIYDTSKLASGIPARFSGSGPGTDYTLTISSLEPEDFAVYYCQQWSSNPQYTFGQGTKLEIK

SEQ ID NO: 3201 - protein, 107 aa, Artificial Sequence
  Description of Artificial Sequence: Synthetic polypeptide
EIVLTQSPATLSLSPGERATLSCSVSSSVSYMHWYQQKPGQAPKLLIYDTSKLASGIPARFSGSGSGTDYTLTISRLEPEDFAVYYCQQWSSNPQYTFGQGTKLEIK

SEQ ID NO: 3202 - protein, 107 aa, Artificial Sequence
  Description of Artificial Sequence: Synthetic polypeptide
EIVLTQSPATLSLSPGERATLSCSVSSSVSYMHWYQQKPGQAPKLLIYDTSKLASGIPARFSGSGSGTDYTLTISSLQPEDFAVYYCQQWSSNPQYTFGQGTKLEIK

SEQ ID NO: 3203 - protein, 107 aa, Artificial Sequence
  Description of Artificial Sequence: Synthetic polypeptide
EIVLTQSPATLSVSPGERATLSCSVSSSVSYMHWYQQKPGQAPKLLIYDTSKLASGIPARFSGSGSGTEYTLTISSLQSEDFAVYYCQQWSSNPQYTFGQGTKLEIK

SEQ ID NO: 3204 - protein, 107 aa, Artificial Sequence
  Description of Artificial Sequence: Synthetic polypeptide
EIVLTQSPATLSVSPGERATLSCSVSSSVSYMHWYQQKPGQAPKLLIYDTSKLASGIPARFSGSGSGTEYTLTISILQSEDFAVYYCQQWSSNPQYTFGQGTKLEIK

SEQ ID NO: 3205 - protein, 107 aa, Artificial Sequence
  Description of Artificial Sequence: Synthetic polypeptide
EIVLTQSPPTLSLSPGERVTLSCSVSSSVSYMHWYQQKPGQAPKLLIYDTSKLASSIPARFSGSGSGTDYTLTISSLQPEDFAVYYCQQWSSNPQYTFGQGTKLEIK

SEQ ID NO: 3206 - protein, 107 aa, Artificial Sequence
  Description of Artificial Sequence: Synthetic polypeptide
DIQLTQSPSSLSASVGDRVTITCSVSSSVSYMHWYQQKPGKAPKSLIYDTSKLASGVPSRFSGSGSGTDYTLTISSLQPEDFATYYCQQWSSNPQYTFGQGTKLEIK

SEQ ID NO: 3207 - protein, 107 aa, Artificial Sequence
  Description of Artificial Sequence: Synthetic polypeptide
DIQLTQSPSSLSASVGDRVTITCSVSSSVSYMHWYQQKPGKAPKRLIYDTSKLASGVPSRFSGSGSGTEYTLTISNLQPEDFATYYCQQWSSNPQYTFGQGTKLEIK

SEQ ID NO: 3208 - protein, 107 aa, Artificial Sequence
  Description of Artificial Sequence: Synthetic polypeptide
DIQLTQSPSAMSASVGDRVTITCSVSSSVSYMHWYQQKPGKVPKRLIYDTSKLASGVPSRFSGSGSGTEYTLTISSLQPEDFATYYCQQWSSNPQYTFGQGTKLEIK

SEQ ID NO: 3209 - protein, 107 aa, Artificial Sequence
  Description of Artificial Sequence: Synthetic polypeptide
EIVLTQSPATLSLSPGERATLSCSVSSSVSYMHWYQQKPGQAPKLLIYDTSKLASGIPDRFSGSGSGTDYTLTISRLEPEDFAVYYCQQWSSNPQYTFGQGTKLEIK

SEQ ID NO: 3210 - protein, 107 aa, Artificial Sequence
  Description of Artificial Sequence: Synthetic polypeptide
EIVLTQSPATLSLSPGERATLSCSVSSSVSYMHWYQQKPGLAPKLLIYDTSKLASGIPDRFSGSGSGTDYTLTISRLEPEDFAVYYCQQWSSNPQYTFGQGTKLEIK

SEQ ID NO: 3211 - protein, 107 aa, Artificial Sequence
  Description of Artificial Sequence: Synthetic polypeptide
EIVLTQSPGTLSLSPGERATLSCSVSSSVSYMHWYQQKPGQAPKLLIYDTSKLASGIPDRFSGSGSGTDYTLTISRLEPEDFAVYYCQQWSSNPQYTFGQGTKLEIK

SEQ ID NO: 3212 - protein, 107 aa, Artificial Sequence
  Description of Artificial Sequence: Synthetic polypeptide
DIQLTQSPSSLSASVGDRVTITCSVSSSVSYMHWYQQKPGKAPKSLIYDTSKLASGVPSKFSGSGSGTDYTLTISSLQPEDFATYYCQQWSSNPQYTFGQGTKLEIK

SEQ ID NO: 3213 - protein, 107 aa, Artificial Sequence
  Description of Artificial Sequence: Synthetic polypeptide
DIQLTQSPSSLSASVGDRVTITCSVSSSVSYMHWYQQKPEKAPKSLIYDTSKLASGVPSRFSGSGSGTDYTLTISSLQPEDFATYYCQQWSSNPQYTFGQGTKLEIK

SEQ ID NO: 3214 - protein, 107 aa, Artificial Sequence
  Description of Artificial Sequence: Synthetic polypeptide
DIVLTQSPDSLAVSLGERATINCSVSSSVSYMHWYQQKPGQPPKLLIYDTSKLASGVPDRFSGSGSGTDYTLTISSLQAEDVAVYYCQQWSSNPQYTFGQGTKLEIK

SEQ ID NO: 3215 - protein, 107 aa, Artificial Sequence
  Description of Artificial Sequence: Synthetic polypeptide
EIVLTQTPLSLSITPGEQASMSCSVSSSVSYMHWYLQKARPVPKLLIYDTSKLASGVPDRFSGSGSGTDYTLKISRVEAEDFGVYYCQQWSSNPQYTFGQGTKLEIK

SEQ ID NO: 3216 - protein, 107 aa, Artificial Sequence
  Description of Artificial Sequence: Synthetic polypeptide
EIVLTQTPLSLSITPGEQASISCSVSSSVSYMHWYLQKARPVPKLLIYDTSKLASGVPDRFSGSGSGTDYTLKISRVEAEDFGVYYCQQWSSNPQYTFGQGTKLEIK

SEQ ID NO: 3217 - protein, 107 aa, Artificial Sequence
  Description of Artificial Sequence: Synthetic polypeptide
DIVLTQSPLSLPVTPGEPASISCSVSSSVSYMHWYLQKPGQSPKLLIYDTSKLASGVPDRFSGSGSGTDYTLKISRVEAEDVGVYYCQQWSSNPQYTFGQGTKLEIK

SEQ ID NO: 3218 - protein, 107 aa, Artificial Sequence
  Description of Artificial Sequence: Synthetic polypeptide
DIVLTQSPLSLPVTLGQPASISCSVSSSVSYMHWYQQRPGQSPKRLIYDTSKLASGVPDRFSGSGSGTDYTLKISRVEAEDVGVYYCQQWSSNPQYTFGQGTKLEIK

SEQ ID NO: 3219 - protein, 107 aa, Artificial Sequence
  Description of Artificial Sequence: Synthetic polypeptide
DIVLTQTPLSLPVTPGEPASISCSVSSSVSYMHWYLQKPGQSPKLLIYDTSKLASGVPDRFSGSGSGTDYTLKISRVEAEDVGVYYCQQWSSNPQYTFGQGTKLEIK

SEQ ID NO: 3220 - protein, 107 aa, Artificial Sequence
  Description of Artificial Sequence: Synthetic polypeptide
DIVLTQTPLSLSVTPGQPASISCSVSSSVSYMHWYLQKPGQSPKLLIYDTSKLASGVPDRFSGSGSGTDYTLKISRVEAEDVGVYYCQQWSSNPQYTFGQGTKLEIK

SEQ ID NO: 3221 - protein, 107 aa, Artificial Sequence
  Description of Artificial Sequence: Synthetic polypeptide
DIVLTQTPLSLSVTPGQPASISCSVSSSVSYMHWYLQKPGQPPKLLIYDTSKLASGVPDRFSGSGSGTDYTLKISRVEAEDVGVYYCQQWSSNPQYTFGQGTKLEIK

SEQ ID NO: 3222 - protein, 107 aa, Artificial Sequence
  Description of Artificial Sequence: Synthetic polypeptide
DIQLIQSPSFLSASVGDRVSIICSVSSSVSYMHWYLQKPGKSPKLFIYDTSKLASGVSSRFSGRGSGTDYTLTIISLKPEDFAAYYCQQWSSNPQYTFGQGTKLEIK

SEQ ID NO: 3223 - protein, 107 aa, Artificial Sequence
  Description of Artificial Sequence: Synthetic polypeptide
DIVLTQTPLSSPVTLGQPASISCSVSSSVSYMHWYQQRPGQPPKLLIYDTSKLASGVPDRFSGSGAGTDYTLKISRVEAEDVGVYYCQQWSSNPQYTFGQGTKLEIK

SEQ ID NO: 3224 - protein, 107 aa, Artificial Sequence
  Description of Artificial Sequence: Synthetic polypeptide
EITLTQSPAFMSATPGDKVNISCSVSSSVSYMHWYQQKPGEAPKFIIYDTSKLASGIPPRFSGSGYGTDYTLTINNIESEDAAYYYCQQWSSNPQYTFGQGTKLEIK

SEQ ID NO: 3225 - protein, 117 aa, Artificial Sequence
  Description of Artificial Sequence: Synthetic polypeptide
EVQLVESGGGLVKPGGSLRLSCAVSGFTFRSYGMSWVRQAPGKGLEWVALISSGGSYTYYTDSVKGRFTISRDNSKNTLYLQMNSLKTEDTAVYYCSRHGGNFFDYWGQGTTVTVSS

SEQ ID NO: 3226 - protein, 117 aa, Artificial Sequence
  Description of Artificial Sequence: Synthetic polypeptide
EVQLVESGGALVKPGGSLRLSCAVSGFTFRSYGMSWVRQAPGKGLEWVALISSGGSYTYYTDSVKGRFTISRDNSKNTLYLQMNSLKTEDTAVYYCSRHGGNFFDYWGQGTTVTVSS

SEQ ID NO: 3227 - protein, 117 aa, Artificial Sequence
  Description of Artificial Sequence: Synthetic polypeptide
EVQLVESGGGLVQPGGSLRLSCAVSGFTFRSYGMSWVRQAPGKGLEWVALISSGGSYTYYTDSVKGRFTISRDNAKNTLYLQMNSLRAEDTAVYYCSRHGGNFFDYWGQGTTVTVSS

SEQ ID NO: 3228 - protein, 117 aa, Artificial Sequence
  Description of Artificial Sequence: Synthetic polypeptide
EVQLVESGGGLVQPGGSLRLSCAVSGFTFRSYGMSWVRQAPGKGLEWVALISSGGSYTYYTDSVKGRFTISRDNAKNSLYLQMNSLRAEDTAVYYCSRHGGNFFDYWGQGTTVTVSS

SEQ ID NO: 3229 - protein, 117 aa, Artificial Sequence
  Description of Artificial Sequence: Synthetic polypeptide
EVQLVESGGGLVQPGGSLRLSCAVSGFTFRSYGMSWVRQAPGKGLEWVALISSGGSYTYYTDSVKGRFTISRDNSKNSLYLQMNSLKTEDTAVYYCSRHGGNFFDYWGQGTTVTVSS

SEQ ID NO: 3230 - protein, 117 aa, Artificial Sequence
  Description of Artificial Sequence: Synthetic polypeptide
EVQLVESGGGLVQPGGSLRLSCAVSGFTFRSYGMSWVRQAPGKGLEWVALISSGGSYTYYTDSVKGRFTISRDNAKNSLYLQMNSLRAEDMAVYYCSRHGGNFFDYWGQGTTVTVSS

SEQ ID NO: 3231 - protein, 117 aa, Artificial Sequence
  Description of Artificial Sequence: Synthetic polypeptide
EVQLVESGGGLVQPGGSLRLSCAVSGFTFRSYGMSWVRQAPGKGLEWVALISSGGSYTYYTDSVKGQFTISRDNAKNTLYLQMNSLRAEDMAVYYCSRHGGNFFDYWGQGTTVTVSS

SEQ ID NO: 3232 - protein, 117 aa, Artificial Sequence
  Description of Artificial Sequence: Synthetic polypeptide
EVQLVESGGGLVKPGRSLRLSCTVSGFTFRSYGMSWVRQAPGKGLEWVALISSGGSYTYYTDSVKGRFTISRDNSKNILYLQMNSLKTEDTAVYYCSRHGGNFFDYWGQGTTVTVSS

SEQ ID NO: 3233 - protein, 117 aa, Artificial Sequence
  Description of Artificial Sequence: Synthetic polypeptide
EVQLVESGGGLVKPGGSLRLSCAVSGFTFRSYGMSWVRQAPGKGLEWVALISSGGSYTYYTDSVKGRFTISRDNAKNSLYLQMNSLRAEDTAVYYCSRHGGNFFDYWGQGTTVTVSS

SEQ ID NO: 3234 - protein, 117 aa, Artificial Sequence
  Description of Artificial Sequence: Synthetic polypeptide
EVQLVESGGGLVQPGGSLKLSCAVSGFTFRSYGMSWVRQASGKGLEWVALISSGGSYTYYTDSVKGRFTISRDNSKNTLYLQMNSLKTEDTAVYYCSRHGGNFFDYWGQGTTVTVSS

SEQ ID NO: 3235 - protein, 117 aa, Artificial Sequence
  Description of Artificial Sequence: Synthetic polypeptide
QVQLVESGGGVVQPGGSLRLSCAVSGFTFRSYGMSWVRQAPGKGLEWVALISSGGSYTYYTDSVKGRFTISRDNSKNTLYLQMNSLRAEDTAVYYCSRHGGNFFDYWGQGTTVTVSS

SEQ ID NO: 3236 - protein, 117 aa, Artificial Sequence
  Description of Artificial Sequence: Synthetic polypeptide
QVQLVESGGGVVQPGRSLRLSCAVSGFTFRSYGMSWVRQAPGKGLEWVALISSGGSYTYYTDSVKGRFTISRDNSKNTLYLQMSSLRAEDTAVYYCSRHGGNFFDYWGQGTTVTVSS

SEQ ID NO: 3237 - protein, 117 aa, Artificial Sequence
  Description of Artificial Sequence: Synthetic polypeptide
EVQLVESGGGLVQPGGSLRLSCPVSGFTFRSYGMSWVRQAPGKGLEWVALISSGGSYTYYTDSVKGRFTISRDNANNSLYLQMNSLRAEDTAVYYCSRHGGNFFDYWGQGTTVTVSS

SEQ ID NO: 3238 - protein, 117 aa, Artificial Sequence
  Description of Artificial Sequence: Synthetic polypeptide
EVQLVESGGGLVQPGRSLRLSCTVSGFTFRSYGMSWVRQAPGKGLEWVALISSGGSYTYYTDSVKGRFTISRDNSKNILYLQMNSLKTEDTAVYYCSRHGGNFFDYWGQGTTVTVSS

SEQ ID NO: 3239 - protein, 117 aa, Artificial Sequence
  Description of Artificial Sequence: Synthetic polypeptide
EVQLVESGGGLVQPGPSLRLSCTVSGFTFRSYGMSWVRQAPGKGLEWVALISSGGSYTYYTDSVKGRFTISRDNSKNILYLQMNSLKTEDTAVYYCSRHGGNFFDYWGQGTTVTVSS

SEQ ID NO: 3240 - protein, 117 aa, Artificial Sequence
  Description of Artificial Sequence: Synthetic polypeptide
EVQLVESGGGLVQPGGSLRLSCAVSGFTFRSYGMSWVRQAPGKGLEWVALISSGGSYTYYTDSVKGRFTISRDNSKNTLYLQMNSLRAEDTAVYYCSRHGGNFFDYWGQGTTVTVSS

SEQ ID NO: 3241 - protein, 117 aa, Artificial Sequence
  Description of Artificial Sequence: Synthetic polypeptide
EVQLVESGGGLVQPGGSLRLSCAVSGFTFRSYGMSWVRQAPGKGLEWVALISSGGSYTYYTDSVKGRFTISRDNAKNSLYLQMNSLRDEDTAVYYCSRHGGNFFDYWGQGTTVTVSS

SEQ ID NO: 3242 - protein, 117 aa, Artificial Sequence
  Description of Artificial Sequence: Synthetic polypeptide
QVQLVESGGGLVKPGGSLRLSCAVSGFTFRSYGMSWVRQAPGKGLEWVALISSGGSYTYYTDSVKGRFTISRDNAKNSLYLQMNSLRAEDTAVYYCSRHGGNFFDYWGQGTTVTVSS

SEQ ID NO: 3243 - protein, 117 aa, Artificial Sequence
  Description of Artificial Sequence: Synthetic polypeptide
QVQLVESGGGVVQPGRSLRLSCAVSGFTFRSYGMSWVRQAPGKGLEWVALISSGGSYTYYTDSVKGRFTISRDNSKNTLYLQMNSLRAEDTAVYYCSRHGGNFFDYWGQGTTVTVSS

SEQ ID NO: 3244 - protein, 117 aa, Artificial Sequence
  Description of Artificial Sequence: Synthetic polypeptide
EVQLLESGGGLVQPGGSLRLSCAVSGFTFRSYGMSWVRQAPGKGLEWVALISSGGSYTYYTDSVKGRFTISRDNSKNTLYLQMNSLRAEDTAVYYCSRHGGNFFDYWGQGTTVTVSS

SEQ ID NO: 3245 - protein, 117 aa, Artificial Sequence
  Description of Artificial Sequence: Synthetic polypeptide
EVQLVESGGGLVQPGGSLRLSCAVSGFTFRSYGMSWVRQAPGKGLEWVALISSGGSYTYYTDSVKGRFTISRHNSKNTLYLQMNSLRAEDTAVYYCSRHGGNFFDYWGQGTTVTVSS

SEQ ID NO: 3246 - protein, 117 aa, Artificial Sequence
  Description of Artificial Sequence: Synthetic polypeptide
EVQLVESGGGLIQPGGSLRLSCAVSGFTFRSYGMSWVRQPPGKGLEWVALISSGGSYTYYTDSVKGRFTISRDNSKNTLYLQMNSLRAEDTAVYYCSRHGGNFFDYWGQGTTVTVSS

SEQ ID NO: 3247 - protein, 117 aa, Artificial Sequence
  Description of Artificial Sequence: Synthetic polypeptide
EVQLVESGGGLIQPGGSLRLSCAVSGFTFRSYGMSWVRQAPGKGLEWVALISSGGSYTYYTDSVKGRFTISRDNSKNTLYLQMNSLRAEDTAVYYCSRHGGNFFDYWGQGTTVTVSS

SEQ ID NO: 3248 - protein, 117 aa, Artificial Sequence
  Description of Artificial Sequence: Synthetic polypeptide
EVQLVESGGGLVQPGRSLRLSCAVSGFTFRSYGMSWVRQAPGKGLEWVALISSGGSYTYYTDSVKGRFTISRDNAKNSLYLQMNSLRAEDTALYYCSRHGGNFFDYWGQGTTVTVSS

SEQ ID NO: 3249 - protein, 117 aa, Artificial Sequence
  Description of Artificial Sequence: Synthetic polypeptide
QVQLVESGGGVVQPGRSLRLSCAVSGFTFRSYGMSWVRQAPGKGLEWVALISSGGSYTYYTDSVKGRFTISRDNSKNRLYLQMNSLRAEDTAVYYCSRHGGNFFDYWGQGTTVTVSS

SEQ ID NO: 3250 - protein, 117 aa, Artificial Sequence
  Description of Artificial Sequence: Synthetic polypeptide
QVQLVESGGGVVQPGRSLRLSCAVSGFTFRSYGMSWVRQAPGKGLEWVALISSGGSYTYYTDSVKGRFTISRDNSKNTLYLQMNSLRAEGTAVYYCSRHGGNFFDYWGQGTTVTVSS

SEQ ID NO: 3251 - protein, 117 aa, Artificial Sequence
  Description of Artificial Sequence: Synthetic polypeptide
QVQLVESGGGVVQPGRSLRLSCAVSGFTFRSYGMSWVRQAPGKGLEWVALISSGGSYTYYTDSVKGRFAISRDNSKNTLYLQMNSLRAEDTAVYYCSRHGGNFFDYWGQGTTVTVSS

SEQ ID NO: 3252 - protein, 117 aa, Artificial Sequence
  Description of Artificial Sequence: Synthetic polypeptide
QVQLVDSGGGVVQPGRSLRLSCAVSGFTFRSYGMSWVRQAPGKGLEWVALISSGGSYTYYTDSVKGRFTISRDNSKNTLYLQMNSLRAEDTAVYYCSRHGGNFFDYWGQGTTVTVSS

SEQ ID NO: 3253 - protein, 117 aa, Artificial Sequence
  Description of Artificial Sequence: Synthetic polypeptide
EVQLVESGGGVVRPGGSLRLSCAVSGFTFRSYGMSWVRQAPGKGLEWVALISSGGSYTYYTDSVKGRFTISRDNAKNSLYLQMNSLRAEDTALYHCSRHGGNFFDYWGQGTTVTVSS

SEQ ID NO: 3254 - protein, 117 aa, Artificial Sequence
  Description of Artificial Sequence: Synthetic polypeptide
EVQLVESGGVVVQPGGSLRLSCAVSGFTFRSYGMSWVRQAPGKGLEWVALISSGGSYTYYTDSVKGRFTISRDNSKNSLYLQMNSLRAEDTALYYCSRHGGNFFDYWGQGTTVTVSS

SEQ ID NO: 3255 - protein, 117 aa, Artificial Sequence
  Description of Artificial Sequence: Synthetic polypeptide
EVQLVESGGGVVQPGGSLRLSCAVSGFTFRSYGMSWVRQAPGKGLEWVALISSGGSYTYYTDSVKGRFTISRDNSKNSLYLQMNSLRTEDTALYYCSRHGGNFFDYWGQGTTVTVSS

SEQ ID NO: 3256 - protein, 117 aa, Artificial Sequence
  Description of Artificial Sequence: Synthetic polypeptide
EVQLVESGGVVVQPGGSLRLSCAVSGFTFRSYGMSWVRQAPGKGLEWVALISSGGSYTYYTDSVKGRFTISRDNSKNSLYLQMNSLRTEDTALYYCSRHGGNFFDYWGQGTTVTVSS

SEQ ID NO: 3257 - protein, 117 aa, Artificial Sequence
  Description of Artificial Sequence: Synthetic polypeptide
EVQLVETGGGLIQPGGSLRLSCAVSGFTFRSYGMSWVRQAPGKGLEWVALISSGGSYTYYTDSVKGRFTISRDNSKNTLYLQMNSLRAEDTAVYYCSRHGGNFFDYWGQGTTVTVSS

SEQ ID NO: 3258 - protein, 117 aa, Artificial Sequence
  Description of Artificial Sequence: Synthetic polypeptide
EVQLVESGGGLVQPGGSLRLSCAVSGFTFRSYGMSWVRQATGKGLEWVALISSGGSYTYYTDSVKGRFTISRENAKNSLYLQMNSLRAGDTAVYYCSRHGGNFFDYWGQGTTVTVSS

SEQ ID NO: 3259 - protein, 117 aa, Artificial Sequence
  Description of Artificial Sequence: Synthetic polypeptide
EVQLVESRGVLVQPGGSLRLSCAVSGFTFRSYGMSWVRQAPGKGLEWVALISSGGSYTYYTDSVKGRFTISRDNSKNTLHLQMNSLRAEDTAVYYCSRHGGNFFDYWGQGTTVTVSS

SEQ ID NO: 3260 - protein, 117 aa, Artificial Sequence
  Description of Artificial Sequence: Synthetic polypeptide
EVQLVESGGGLVQPGRSLRLSCAVSGFTFRSYGMSWVRQAPGKGLEWVALISSGGSYTYYTDSVKGRFTISRDNAKNSLYLQMNSLRAEDMALYYCSRHGGNFFDYWGQGTTVTVSS

SEQ ID NO: 3261 - protein, 117 aa, Artificial Sequence
  Description of Artificial Sequence: Synthetic polypeptide
QVQLVESGGGLVQPGGSLRLSCSVSGFTFRSYGMSWVRQAPGKGLEWVALISSGGSYTYYTDSVKGRFTISRDNSKNTLYLQMNSLRAEDTAVYYCSRHGGNFFDYWGQGTTVTVSS

SEQ ID NO: 3262 - protein, 117 aa, Artificial Sequence
  Description of Artificial Sequence: Synthetic polypeptide
EVQLVESGGGLVQPGGSLRLSCSVSGFTFRSYGMSWVRQAPGKGLEWVALISSGGSYTYYTDSVKGRFTISRDNSKNTLYLQMSSLRAEDTAVYYCSRHGGNFFDYWGQGTTVTVSS

SEQ ID NO: 3263 - protein, 117 aa, Artificial Sequence
  Description of Artificial Sequence: Synthetic polypeptide
QVQLVESGGGVVQPGRSLRLSCAVSGFTFRSYGMSWVRQAPGKGLEWVALISSGGSYTYYTDSVKGRFTISRDNSTNTLFLQMNSLRAEDTAVYYCSRHGGNFFDYWGQGTTVTVSS

SEQ ID NO: 3264 - protein, 117 aa, Artificial Sequence
  Description of Artificial Sequence: Synthetic polypeptide
QVQLLESGGGLVKPGGSLRLSCAVSGFTFRSYGMSWVRQAPGKGLEWVALISSGGSYTYYTDSVKGRFTISRDNAKNSLYLQMNSLRAEDTAVYYCSRHGGNFFDYWGQGTTVTVSS

SEQ ID NO: 3265 - protein, 117 aa, Artificial Sequence
  Description of Artificial Sequence: Synthetic polypeptide
EVQLVESGEGLVQPGGSLRLSCAVSGFTFRSYGMSWVRQAPGKGLEWVALISSGGSYTYYTDSVKGRFTISRDNSKNTLYLQMGSLRAEDMAVYYCSRHGGNFFDYWGQGTTVTVSS

SEQ ID NO: 3266 - protein, 117 aa, Artificial Sequence
  Description of Artificial Sequence: Synthetic polypeptide
EVQLVESGGGLVQPGGSLRLSCAVSGFTFRSYGMSWVRQAPGKGLEWVALISSGGSYTYYTDSVKGRFTISRDNSKNTLYLQMGSLRAEDMAVYYCSRHGGNFFDYWGQGTTVTVSS

SEQ ID NO: 3267 - protein, 117 aa, Artificial Sequence
  Description of Artificial Sequence: Synthetic polypeptide
EVQLVESGGGLVQPGGSLRLSCSVSGFTFRSYGMSWVRQAPGKGLEWVALISSGGSYTYYTDSVKGRFTISRDNSKNTLYVQMSSLRAEDTAVYYCSRHGGNFFDYWGQGTTVTVSS

SEQ ID NO: 3268 - protein, 117 aa, Artificial Sequence
  Description of Artificial Sequence: Synthetic polypeptide
EVQLVESGGGLVQPGGSLRLSCAVSGFTFRSYGMSWVRQAPGKGLEWVALISSGGSYTYYTDSVKGRFIISRDNSRNSLYLQKNRRRAEDMAVYYCSRHGGNFFDYWGQGTTVTVSS

SEQ ID NO: 3269 - protein, 117 aa, Artificial Sequence
  Description of Artificial Sequence: Synthetic polypeptide
EVQLVESGGGLVQPGGSLRLSCAVSGFTFRSYGMSWVHQAPGKGLEWVALISSGGSYTYYTDSVKGRFIISRDNSRNTLYLQTNSLRAEDTAVYYCSRHGGNFFDYWGQGTTVTVSS

SEQ ID NO: 3270 - protein, 117 aa, Artificial Sequence
  Description of Artificial Sequence: Synthetic polypeptide
EVHLVESGGGLVQPGGALRLSCAVSGFTFRSYGMSWVRQATGKGLEWVALISSGGSYTYYTDSVKGRFTISRENAKNSLYLQMNSLRAGDTAVYYCSRHGGNFFDYWGQGTTVTVSS

SEQ ID NO: 3271 - protein, 117 aa, Artificial Sequence
  Description of Artificial Sequence: Synthetic polypeptide
EVQLVESGGGLVQPRGSLRLSCAVSGFTFRSYGMSWVRQAPGKGLEWVALISSGGSYTYYTDSVKGRFTISRDNSKNTLYLQMNNLRAEGTAVYYCSRHGGNFFDYWGQGTTVTVSS

SEQ ID NO: 3272 - protein, 117 aa, Artificial Sequence
  Description of Artificial Sequence: Synthetic polypeptide
EVQLVESGGGLVQPRGSLRLSCAVSGFTFRSYGMSWVRQAPGKGLEWVALISSGGSYTYYTDSVKGRFTISRDNSKNTLYLQMNNLRAEGTAAYYCSRHGGNFFDYWGQGTTVTVSS

SEQ ID NO: 3273 - protein, 117 aa, Artificial Sequence
  Description of Artificial Sequence: Synthetic polypeptide
QVQLVQSGAEVKKPGASVKVSCKVSGFTFRSYGMSWVRQAPGKGLEWVALISSGGSYTYYTDSVKGRFTITRDNSTNTLYMELSSLRSEDTAVYYCSRHGGNFFDYWGQGTTVTVSS

SEQ ID NO: 3274 - protein, 117 aa, Artificial Sequence
  Description of Artificial Sequence: Synthetic polypeptide
QVQLVQSGSELKKPGASVKVSCKVSGFTFRSYGMSWVRQAPGQGLEWVALISSGGSYTYYTDSVKGRFVISRDNSVNTLYLQISSLKAEDTAVYYCSRHGGNFFDYWGQGTTVTVSS

SEQ ID NO: 3275 - protein, 470 aa, Artificial Sequence
  Description of Artificial Sequence: Synthetic polypeptide
METDTLLLWVLLLWVPGSTGQVQLVESGGGVVQPGRSLRLSCAASGIDFSRYWMSWVRQAPGKGLEWVGEINPDSSTINYAPSLKDRFTISRDNSKNTLYLQMSSLRAEDTAVYYCASLYYDYGDAMDYWGQGTTVTVSSASTKGPSVFPLAPSSKSTSGGTAALGCLVKDYFPEPVTVSWNSGALTSGVHTFPAVLQSSGLYSLSSVVTVPSSSLGTQTYICNVNHKPSNTKVDKRVEPKSCDKTHTCPPCPAPELLGGPSVFLFPPKPKDTLMISRTPEVTCVVVDVSHEDPEVKFNWYVDGVEVHNAKTKPREEQYNATYRVVSVLTVLHQDWLNGKEYKCKVSNKALPAPIEKTISKAKGQPREPQVYTLPPCREEMTKNQVSLWCLVKGFYPSDIAVEWESNGQPENNYKTTPPVLDSDGSFFLYSKLTVDKSRWQQGNVFSCSVMHEALHNHYTQKSLSLSPGK

SEQ ID NO: 3276 - protein, 503 aa, Artificial Sequence
  Description of Artificial Sequence: Synthetic polypeptide
METDTLLLWVLLLWVPGSTGQVQLVQSGAEVKKPGSSVKVSCKASGYSFTTYYIHWVRQAPGQGLEWMGWFFPGSGNIKYNEKFKGRVTITADTSTSTAYMELSSLRSEDTAVYYCAGSYYSYDVLDYWGQGTTVTVSSGGGGSGGGGSGGGGSGGGGSDIQMTQSPSFLSASVGDRVTITCKASQNVGINVVWHQQKPGKAPKALIYSSSHRYSGVPSRFSGSGSGTEFTLTISSLQPEDFATYFCQQFKSYPLTFGQGTKLEIKGGGGSGGGGSDKTHTCPPCPAPELLGGPSVFLFPPKPKDTLMISRTPEVTCVVVDVSHEDPEVKFNWYVDGVEVHNAKTKPREEQYASTYRVVSVLTVLHQDWLNGKEYKCKVSNKALPAPIEKTISKAKGQPREPQVCTLPPSREEMTKNQVSLSCAVKGFYPSDIAVEWESNGQPENNYKTTPPVLDSDGSFFLVSKLTVDKSRWQQGNVFSCSVMHEALHNHYTQKSLSLSPGK

SEQ ID NO: 3277 - protein, 234 aa, Artificial Sequence; identical to SEQ ID NO: 1007
  Description of Artificial Sequence: Synthetic polypeptide

SEQ ID NO: 3278 - protein, 469 aa, Artificial Sequence
  Description of Artificial Sequence: Synthetic polypeptide
METDTLLLWVLLLWVPGSTGQVQLVQSGAEVKKPGSSVKVSCKASGYSFTTYYIHWVRQAPGQGLEWMGWFFPGSGNIKYNEKFKGRVTITADTSTSTAYMELSSLRSEDTAVYYCAGSYYSYDVLDYWGQGTTVTVSSASTKGPSVFPLAPSSKSTSGGTAALGCLVKDYFPEPVTVSWNSGALTSGVHTFPAVLQSSGLYSLSSVVTVPSSSLGTQTYICNVNHKPSNTKVDKRVEPKSCDKTHTCPPCPAPELLGGPSVFLFPPKPKDTLMISRTPEVTCVVVDVSHEDPEVKFNWYVDGVEVHNAKTKPREEQYNSTYRVVSVLTVLHQDWLNGKEYKCKVSNKALPAPIEKTISKAKGQPREPQVYTLPPSREEMTKNQVSLTCLVKGFYPSDIAVEWESNGQPENNYKTTPPVLDSDGSFFLYSKLTVDKSRWQQGNVFSCSVMHEALHNHYTQKSLSLSPGK

SEQ ID NO: 3279 - protein, 234 aa, Artificial Sequence
  Description of Artificial Sequence: Synthetic polypeptide
METDTLLLWVLLLWVPGSTGDIQMTQSPSSLSASVGDRVTITCKASQNVGINVVWHQQKPGKVPKALIYSSSHRYSGVPSRFSGSGSGTDFTLTISSLQPEDVATYFCQQFKSYPLTFGQGTKLEIKRTVAAPSVFIFPPSDEQLKSGTASVVCLLNNFYPREAKVQWKVDNALQSGNSQESVTEQDSKDSTYSLSSTLTLSKADYEKHKVYACEVTHQGLSSPVTKSFNRGEC

SEQ ID NO: 3280 - protein, 247 aa, Artificial Sequence
  Description of Artificial Sequence: Synthetic polypeptide
METDTLLLWVLLLWVPGSTGDKTHTCPPCPAPELLGGPSVFLFPPKPKDTLMISRTPEVTCVVVDVSHEDPEVKFNWYVDGVEVHNAKTKPREEQYNSTYRVVSVLTVLHQDWLNGKEYKCKVSNKALPAPIEKTISKAKGQPREPQVYTLPPCREEMTKNQVSLWCLVKGFYPSDIAVEWESNGQPENNYKTTPPVLDSDGSFFLYSKLTVDKSRWQQGNVFSCSVMHEALHNRFTQKSLSLSPGK

SEQ ID NO: 3281 - protein, 520 aa, Artificial Sequence
  Description of Artificial Sequence: Synthetic polypeptide
METDTLLLWVLLLWVPGSTGEVQLVESGGGLVQPGGSLRLSCAASGFTFSNFGMHWVRQAPGKGLEWVSYISSGSSTIYYADTLKGRFTISRDNSKNTLYLQMNSLRAEDTAVYYCARRGEGAMDYWGQGTTVTVSSGGGGSGGGGSGGGGSGGGGSDNQLTQSPSFLSASVGDRVTITCRASSSVNYIYWYQQKPGKAPKLLIYYTSNLAPGVPSRFSGSGSGNEYTLTISSLQPEDFATYYCQQFTSSPFTFGQGTKLEIKGGGGSDKTHTCPPCPAPELLGGPSVFLFPPKPKDTLMISRTPEVTCVVVDVSHEDPEVKFNWYVDGVEVHNAKTKPREEQYNSTYRVVSVLTVLHQDWLNGKEYKCKVSNKALPAPIEKTISKAKGQPREPQVCTLPPSREEMTKNQVSLSCAVKGFYPSDIAVEWESNGQPENNYKTTPPVLDSDGSFFLVSKLTVDKSRWQQGNVFSCSVMHEALHNHYTQKSLSLSPGKGGGGSGGGGSGLNDIFEAQKIEWHE

SEQ ID NO: 3282 - protein, 284 aa, Artificial Sequence
  Description of Artificial Sequence: Synthetic polypeptide
METDTLLLWVLLLWVPGSTGGLNDIFEAQKIEWHEGGGGSEPRTDTDTCPNPPDPCPTCPTPDLLGGPSVFIFPPKPKDVLMISLTPKITCVVVDVSEEEPDVQFNWYVNNVEDKTAQTETRQRQYNSTYRVVSVLPIKHQDWMSGKVFKCKVNNNALPSPIEKTISKPRGQVRVPQIYTFPPPIEQTVKKDVSVTCLVTGFLPQDIHVEWESNGQPQPEQNYKNTQPVLDSDGSYFLYSKLNVPKSRWDQGDSFTCSVIHEALHNHHMTKTISRSLGNGGGGS

SEQ ID NO: 3283 - protein, 272 aa, Homo sapiens
METDTLLLWVLLLWVPGSTGDKTHTCPPCPAPELLGGPSVFLFPPKPKDTLMISRTPEVTCVVVDVSHEDPEVKFNWYVDGVEVHNAKTKPREEQYNSTYRVVSVLTVLHQDWLNGKEYKCKVSNKALPAPIEKTISKAKGQPREPQVYTLPPSREEMTKNQVSLTCLVKGFYPSDIAVEWESNGQPENNYKTTPPVLDSDGSFFLYSKLTVDKSRWQQGNVFSCSVMHEALHNHYTQKSLSLSPGKGGGGSGGGGSGLNDIFEAQKIEWHE

SEQ ID NO: 3284 - protein, 469 aa, Artificial Sequence
  Description of Artificial Sequence: Synthetic polypeptide
METDTLLLWVLLLWVPGSTGQVQLQQSGPELVKPGASVKISCKASGYAFSSSWMNWVKQRPGQGLEWIGRIYPGDGDTKYNGKFKGKATLTADKSSSTAYMHLSSLTSVDSAVYFCARRGTGGWYFDVWGAGTTVTVSSAKTTAPSVYPLAPVCGDTTGSSVTLGCLVKGYFPEPVTLTWNSGSLSSGVHTFPAVLQSDLYTLSSSVTVTSSTWPSQSITCNVAHPASSTKVDKKIEPRGPTIKPCPPCKCPAPNLLGGPSVFIFPPKIKDVLMISLSPIVTCVVVDVSEDDPDVQISWFVNNVEVHTAQTQTHREDYNSTLRVVSALPIQHQDWMSGKEFKCKVNNKDLPAPIERTISKPKGSVRAPQVYVLPPPEEEMTKKQVTLTCMVTDFMPEDIYVEWTNNGKTELNYKNTEPVLDSDGSYFMYSKLRVEKKNWVERNSYSCSVVHEGLHNHHTTKSFSRTPGK

SEQ ID NO: 3285 - protein, 238 aa, Artificial Sequence
  Description of Artificial Sequence: Synthetic polypeptide
METDTLLLWVLLLWVPGSTGDIVLTQSPASLAVSLGQRATISCRASESVDSSGNSFMHWYQQKPGQPPQLLIYRASNLESGIPARFSGSGSRTDFTLTINPVEADDVATFYCQQSFDDPFTFGSGTKLEIKRADAAPTVSIFPPSSEQLTSGGASVVCFLNNFYPKDINVKWKIDGSERQNGVLNSWTDQDSKDSTYSMSSTLTLTKDEYERHNSYTCEATHKTSTSPIVKSFNRNEC

SEQ ID NO: 3286 - protein, 739 aa, Artificial Sequence
  Description of Artificial Sequence: Synthetic polypeptide
METDTLLLWVLLLWVPGSTGQVQLVESGGGVVQPGRSLRLSCAASGIDFSRYWMSWVRQAPGKGLEWVGEINPDSSTINYAPSLKDRFTISRDNSKNTLYLQMSSLRAEDTAVYYCASLYYDYGDAMDYWGQGTTVTVSSASTKGPSVFPLAPSSKSTSGGTAALGCLVKDYFPEPVTVSWNSGALTSGVHTFPAVLQSSGLYSLSSVVTVPSSSLGTQTYICNVNHKPSNTKVDKRVEPKSCDKTHTCPPCPAPELLGGPSVFLFPPKPKDTLMISRTPEVTCVVVDVSHEDPEVKFNWYVDGVEVHNAKTKPREEQYNSTYRVVSVLTVLHQDWLNGKEYKCKVSNKALPAPIEKTISKAKGQPREPQVYTLPPCREEMTKNQVSLWCLVKGFYPSDIAVEWESNGQPENNYKTTPPVLDSDGSFFLYSKLTVDKSRWQQGNVFSCSVMHEALHNHYTQKSLSLSPGKGGGGSGGGGSGGGGSEVQLVESGGGLVQPGGSLRLSCAASGFTFSTYAMNWVRQAPGKGLEWVSRIRSKYNNYATYYADSVKDRFTISRDDSKNTLYLQMNSLKTEDTAVYYCVRHGNFGNSYVSWFAYWGQGTLVTVSSGGGGSGGGGSGGGGSGGGGSQAVVTQEPSLTVSPGGTVTLTCRSSTGAVTTSNYANWVQQKPGQAPRGLIGGTNKRAPWTPARFSGSLLGGKAALTLSGAQPEDEAEYYCALWYSNLWVFGGGTKLTVL

SEQ ID NO: 3287 - protein, 247 aa, Artificial Sequence
  Description of Artificial Sequence: Synthetic polypeptide
METDTLLLWVLLLWVPGSTGDKTHTCPPCPAPELLGGPSVFLFPPKPKDTLMISRTPEVTCVVVDVSHEDPEVKFNWYVDGVEVHNAKTKPREEQYNSTYRVVSVLTVLHQDWLNGKEYKCKVSNKALPAPIEKTISKAKGQPREPQVCTLPPSREEMTKNQVSLSCAVKGFYPSDIAVEWESNGQPENNYKTTPPVLDSDGSFFLVSKLTVDKSRWQQGNVFSCSVMHEALHNHYTQKSLSLSPGK

SEQ ID NO: 3288 - protein, 20 aa, Artificial Sequence
  Description of Artificial Sequence: Synthetic peptide
METDTLLLWVLLLWVPGSTG

SEQ ID NO: 3289 - protein, 107 aa, Artificial Sequence; identical to SEQ ID NO: 230
  Description of Artificial Sequence: Synthetic polypeptide
  MOD_RES (30)..(30): G, E, A or D
  MOD_RES (31)..(31): N or D
  MOD_RES (32)..(32): R or K
  MOD_RES (36)..(36): Y or H
  MOD_RES (56)..(56): K or S

SEQ ID NO: 3290 - protein, 119 aa, Artificial Sequence; identical to SEQ ID NO: 231
  Description of Artificial Sequence: Synthetic polypeptide
  MOD_RES (27)..(27): H, T, G or Y
  MOD_RES (28)..(28): D, T or S
  MOD_RES (30)..(30): H, R, D, K or T
  MOD_RES (31)..(31): L, D, K, T or N
  MOD_RES (32)..(32): W, F, T, I, Y or G
  MOD_RES (50)..(50): R or W
  MOD_RES (51)..(51): V, I or F
  MOD_RES (52)..(52): F, S or Y
  MOD_RES (53)..(53): A or P
  MOD_RES (57)..(57): N or S
  MOD_RES (58)..(58): T, V, Y or I
  MOD_RES (59)..(59): K or R
  MOD_RES (98)..(98): G or V
  MOD_RES (100)..(100): Y or I
  MOD_RES (103)..(103): Y or A
  MOD_RES (104)..(104): D or G

SEQ ID NO: 3291 - protein, 238 aa, Homo sapiens
DLKVEMMAGGTQITPLNDNVTIFCNIFYSQPLNITSMGITWFWKSLTFDKEVKVFEFFGDHQEAFRPGAIVSPWRLKSGDASLRLPGIQLEEAGEYRCEVVVTPLKAQGTVQLEVVASPASRLLLDQVGMKENEDKYMCESSGFYPEAINITWEKQTQKFPHPIEISEDVITGPTIKNMDGTFNVTSCLKLNSSQEDPGTVYQCVVRHASLHTPLRSNFTLTAARHSLSETEKTDNFS

SEQ ID NO: 3292 - protein, 284 aa, Homo sapiens
EPHSLRYNLTVLSWDGSVQSGFLTEVHLDGQPFLRCDRQKCRAKPQGQWAEDVLGNKTWDRETRDLTGNGKDLRMTLAHIKDQKEGLHSLQEIRVCEIHEDNSTRSSQHFYYDGELFLSQNLETKEWTMPQSSRAQTLAMNVRNFLKEDAMKTKTHYHAMHADCLQELRRYLKSGVVLRRTVPPMVNVTRSEASEGNITVTCRASGFYPWNITLSWRQDGVSLSHDTQQWGDVLPDGNGTYQTWVATRICQGEEQRFTCYMEHSGNHSTHPVPSGKVLVLQSHW

SEQ ID NO: 3293 - protein, 287 aa, Homo sapiens
AEPHSLRYNLMVLSQDESVQSGFLAEGHLDGQPFLRYDRQKRRAKPQGQWAEDVLGAKTWDTETEDLTENGQDLRRTLTHIKDQKGGLHSLQEIRVCEIHEDSSTRGSRHFYYDGELFLSQNLETQESTVPQSSRAQTLAMNVTNFWKEDAMKTKTHYRAMQADCLQKLQRYLKSGVAIRRTVPPMVNVTCSEVSEGNITVTCRASSFYPRNITLTWRQDGVSLSHNTQQWGDVLPDGNGTYQTWVATRIRQGEEQRFTCYMEHSGNHGTHPVPSGKVLVLQSQRTD

SEQ ID NO: 3294 - protein, 191 aa, Homo sapiens
GWVDTHCLCYDFIITPKSRPEPQWCEVQGLVDERPFLHYDCVNHKAKAFASLGKKVNVTKTWEEQTETLRDVVDFLKGQLLDIQVENLIPIEPLTLQARMSCEHEAHGHGRGSWQFLFNGQKFLLFDSNNRKWTALHPGAKKMTEKWEKNRDVTMFFQKISLGDCKMWLEEFLMYWEQMLDPTKPPSLAPG

SEQ ID NO: 3295 - protein, 329 aa, Homo sapiens
QDVRVQVLPEVRGQLGGTVELPCHLLPPVPGLYISLVTWQRPDAPANHQNVAAFHPKMGPSFPSPKPGSERLSFVSAKQSTGQDTEAELQDATLALHGLTVEDEGNYTCEFATFPKGSVRGMTWLRVIAKPKNQAEAQKVTFSQDPTTVALCISKEGRPPARISWLSSLDWEAKETQVSGTLAGTVTVTSRFTLVPSGRADGVTVTCKVEHESFEEPALIPVTLSVRYPPEVSISGYDDNWYLGRTDATLSCDVRSNPEPTGYDWSTTSGTFPTSAVAQGSQLVIHAVDSLFNTTFVCTVTNAVGMGRAEQVIFVRETPNTAGAGATGG

SEQ ID NO: 3296 - protein, 323 aa, Homo sapiens
WPPPGTGDVVVQAPTQVPGFLGDSVTLPCYLQVPNMEVTHVSQLTWARHGESGSMAVFHQTQGPSYSESKRLEFVAARLGAELRNASLRMFGLRVEDEGNYTCLFVTFPQGSRSVDIWLRVLAKPQNTAEVQKVQLTGEPVPMARCVSTGGRPPAQITWHSDLGGMPNTSQVPGFLSGTVTVTSLWILVPSSQVDGKNVTCKVEHESFEKPQLLTVNLTVYYPPEVSISGYDNNWYLGQNEATLTCDARSNPEPTGYNWSTTMGPLPPFAVAQGAQLLIRPVDKPINTTLICNVTNALGARQAELTVQVKEGPPSEHSGISRN

SEQ ID NO: 3297 - protein, 330 aa, Homo sapiens
QNLFTKDVTVIEGEVATISCQVNKSDDSVIQLLNPNRQTIYFRDFRPLKDSRFQLLNFSSSELKVSLTNVSISDEGRYFCQLYTDPPQESYTTITVLVPPRNLMIDIQKDTAVEGEEIEVNCTAMASKPATTIRWFKGNTELKGKSEVEEWSDMYTVTSQLMLKVHKEDDGVPVICQVEHPAVTGNLQTQRYLEVQYKPQVHIQMTYPLQGLTREGDALELTCEAIGKPQPVMVTWVRVDDEMPQHAVLSGPNLFINNLNKTDNGTYRCEASNIVGKAHSDYMLYVYDPPTTIPPPTTTTTTTTTTTTTILTIITDSRAGEEGSIRAVDH

SEQ ID NO: 3298 - protein, 155 aa, Homo sapiens
QRFAQAQQQLPLESLGWDVAELQLNHTGPQQDPRLYWQGGPALGRSFLHGPELDKGQLRIHRDGIYMVHIQVTLAICSSTTASRHHPTTLAVGICSPASRSISLLRLSFHQGCTIASQRLTPLARGDTLCTNLTGTLLPSRNTDETFFGVQWVRP

SEQ ID NO: 3299 - protein, 294 aa, Homo sapiens
WTYHYSEKPMNWQRARRFCRDNYTDLVAIQNKAEIEYLEKTLPFSRSYYWIGIRKIGGIWTWVGTNKSLTEEAENWGDGEPNNKKNKEDCVEIYIKRNKDAGKWNDDACHKLKAALCYTASCQPWSCSGHGECVEIINNYTCNCDVGYYGPQCQFVIQCEPLEAPELGTMDCTHPLGNFSFSSQCAFSCSEGTNLTGIEETTCGPFGNWSSPEPTCQVIQCEPLSAPDLGIMNCSHPLASFSFTSACTFICSEGTELIGKKKTICESSGIWSNPSPICQKLDKSFSMIKEGDYN

SEQ ID NO: 3300 - protein, 243 aa, Homo sapiens
RYLQVSQQLQQTNRVLEVTNSSLRQQLRLKITQLGQSAEDLQGSRRELAQSQEALQVEQRAHQAAEGQLQACQADRQKTKETLQSEEQQRRALEQKLSNMENRLKPFFTCGSADTCCPSGWIMHQKSCFYISLTSKNWQESQKQCETLSSKLATFSEIYPQSHSYYFLNSLLPNGGSGNSYWTGLSSNKDWKLTDDTQRTRTYAQSSKCNKVHKTWSWWTLESESCRSSLPYICEMTAFRFPD

SEQ ID NO: 3301 - protein, 124 aa, Homo sapiens
KLTRDSQSLCPYDWIGFQNKCYYFSKEEGDWNSSKYNCSTQHADLTIIDNIEEMNFLRRYKCSSDHWIGLKMAKNRTGQWVDGATFTKSFGMRGSEGCAYLSDDGAATARCYTERKWICRKRIH

SEQ ID NO: 3302 - protein, 194 aa, Homo sapiens
QGHLVHMTVVSGSNVTLNISESLPENYKQLTWFYTFDQKIVEWDSRKSKYFESKFKGRVRLDPQSGALYISKVQKEDNSTYIMRVLKKTGNEQEWKIKLQVLDPVPKPVIKIEKIEDMDDNCYLKLSCVIPGESVNYTWYGDKRPFPKELQNSVLETTLMPHNYSRCYTCQVSNSVSSKNGTVCLSPPCTLARS

SEQ ID NO: 3303 - protein, 133 aa, Homo sapiens
QVSHRYPRIQSIKVQFTEYKKEKGFILTSQKEDEIMKVQNNSVIINCDGFYLISLKGYFSQEVNISLHYQKDEEPLFQLKKVRSVNSLMVASLTYKDKVYLNVTTDNTSLDDFHVNGGELILIHQNPGEFCVL

SEQ ID NO: 3304 - protein, 149 aa, Homo sapiens
MQKGDQNPQIAAHVISEASSKTTSVLQWAEKGYYTMSNNLVTLENGKQLTVKRQGLYYIYAQVTFCSNREASSQAPFIASLCLKSPGRFERILLRAANTHSSAKPCGQQSIHLGGVFELQPGASVFVNVTDPSQVSHGTGFTSFGLLKL

SEQ ID NO: 3305 - protein, 205 aa, Homo sapiens
ACPWAVSGARASPGSAASPRLREGPELSPDDPAGLLDLRQGMFAQLVAQNVLLIDGPLSWYSDPGLAGVSLTGGLSYKEDTKELVVAKAGVYYVFFQLELRRVVAGEGSGSVSLALHLQPLRSAAGAAALALTVDLPPASSEARNSAFGFQGRLLHLSAGQRLGVHLHTEARARHAWQLTQGATVLGLFRVTPEIPAGLPSPRSE

SEQ ID NO: 3306 - protein, 455 aa, Artificial Sequence
  Description of Artificial Sequence: Synthetic polypeptide
LNFRAPPVIPNVPFLWAWNAPSEFCLGKFDEPLDMSLFSFIGSPRINATGQGVTIFYVDRLGYYPYIDSITGVTVNGGIPQKISLQDHLDKAKKDITFYMPVDNLGMAVIDWEEWRPTWARNWKPKDVYKNRSIELVQQQNVQLSLTEATEKAKQEFEKAGKDFLVETIKLGKLLRPNHLWGYYLFPDCYNHHYKKPGYNGSCFNVEIKRNDDLSWLWNESTALYPSIYLNTQQSPVAATLYVRNRVREAIRVSKIPDAKSPLPVFAYTRIVFTDQVLKFLSQDELVYTFGETVALGASGIVIWGTLSIMRSMKSCLLLDNYMETILNPYIINVTLAAKMCSQVLCQEQGVCIRKNWNSSDYLHLNPDNFAIQLEKGGKFTVRGKPTLEDLEQFSEKFYCSCYSTLSCKEKADVKDTDAVDVCIADGVCIDAFLKPPMETEEPQIFYNASPSTLS

SEQ ID NO: 3307 - protein, 5 aa, Artificial Sequence
  Description of Artificial Sequence: Synthetic peptide
GGGGS

SEQ ID NO: 3308 - protein, 10 aa, Artificial Sequence
  Description of Artificial Sequence: Synthetic peptide
GGGGSGGGGS

SEQ ID NO: 3309 - protein, 15 aa, Artificial Sequence
  Description of Artificial Sequence: Synthetic peptide
GGGGSGGGGSGGGGS

SEQ ID NO: 3310 - protein, 17 aa, Artificial Sequence
  Description of Artificial Sequence: Synthetic peptide
DVPSGPGGGGGSGGGGS

SEQ ID NO: 3311 - protein, 455 aa, Artificial Sequence; identical to SEQ ID NO: 3306
  Description of Artificial Sequence: Synthetic polypeptide

SEQ ID NO: 3312 - protein, 413 aa, Artificial Sequence
  Description of Artificial Sequence: Synthetic polypeptide
FRGPLLPNRPFTTVWNANTQWCLERHGVDVDVSVFDVVANPGQTFRGPDMTIFYSSQGTYPYYTPTGEPVFGGLPQNASLIAHLARTFQDILAAIPAPDFSGLAVIDWEAWRPRWAFNWDTKDIYRQRSRALVQAQHPDWPAPQVEAVAQDQFQGAARAWMAGTLQLGRALRPRGLWGFYGFPDCYNYDFLSPNYTGQCPSGIRAQNDQLGWLWGQSRALYPSIYMPAVLEGTGKSQMYVQHRVAEAFRVAVAAGDPNLPVLPYVQIFYDTTNHFLPLDELEHSLGESAAQGAAGVVLWVSWENTRTKESCQAIKEYMDTTLGPFILNVTSGALLCSQALCSGHGRCVRRTSHPKALLLLNPASFSIQLTPGGGPLSLRGALSLEDQAQMAVEFKCRCYPGWQAPWCERKSMW

SEQ ID NO: 3313 - protein, 551 aa, Artificial Sequence
  Description of Artificial Sequence: Synthetic polypeptide
YNFFPRKPKWDKNQITYRIIGYTPDLDPETVDDAFARAFQVWSDVTPLRFSRIHDGEADIMINFGRWEHGDGYPFDGKDGLLAHAFAPGTGVGGDSHFDDDELWTLGEGQVVRVKYGNADGEYCKFPFLFNGKEYNSCTDTGRSDGFLWCSTTYNFEKDGKYGFCPHEALFTMGGNAEGQPCKFPFRFQGTSYDSCTTEGRTDGYRWCGTTEDYDRDKKYGFCPETAMSTVGGNSEGAPCVFPFTFLGNKYESCTSAGRSDGKMWCATTANYDDDRKWGFCPDQGYSLFLVAAHEFGHAMGLEHSQDPGALMAPIYTYTKNFRLSQDDIKGIQELYGASPDIDLGTGPTPTLGPVTPEICKQDIVFDGIAQIRGEIFFFKDRFIWRTVTPRDKPMGPLLVATFWPELPEKIDAVYEAPQEEKAVFFAGNEYWIYSASTLERGYPKPLTSLGLPPDVQRVDAAFNWSKNKKTYIFAGDKFWRYNEVKKKMDPGFPKLIADAWNAIPDNLDAVVDLQGGGHSYFFKGAYYLKLENQSLKSVKFGSIKSDWLGC

SEQ ID NO: 3314 - protein, 14 aa, Artificial Sequence
  Description of Artificial Sequence: Synthetic peptide
AEAAAKEAAAKAAA

SEQ ID NO: 3315 - protein, 19 aa, Artificial Sequence
  Description of Artificial Sequence: Synthetic peptide
AEAAAKEAAAKEAAAKAAA

SEQ ID NO: 3316 - protein, 24 aa, Artificial Sequence
  Description of Artificial Sequence: Synthetic peptide
AEAAAKEAAAKEAAAKEAAAKAAA

SEQ ID NO: 3317 - protein, 29 aa, Artificial Sequence
  Description of Artificial Sequence: Synthetic peptide
AEAAAKEAAAKEAAAKEAAAKEAAAKAAA

SEQ ID NO: 3318-3376 - skipped (59 entries)

SEQ ID NO: 3377 - protein, 107 aa, Artificial Sequence; identical to SEQ ID NO: 93
  Description of Artificial Sequence: Synthetic polypeptide

SEQ ID NO: 3378 - protein, 107 aa, Artificial Sequence; identical to SEQ ID NO: 117
  Description of Artificial Sequence: Synthetic polypeptide

SEQ ID NO: 3379 - protein, 107 aa, Artificial Sequence; identical to SEQ ID NO: 199
  Description of Artificial Sequence: Synthetic polypeptide

SEQ ID NO: 3380 - protein, 107 aa, Artificial Sequence; identical to SEQ ID NO: 181
  Description of Artificial Sequence: Synthetic polypeptide

SEQ ID NO: 3381 - protein, 107 aa, Artificial Sequence; identical to SEQ ID NO: 87
  Description of Artificial Sequence: Synthetic polypeptide

SEQ ID NO: 3382 - protein, 107 aa, Artificial Sequence; identical to SEQ ID NO: 160
  Description of Artificial Sequence: Synthetic polypeptide

SEQ ID NO: 3383 - protein, 107 aa, Artificial Sequence; identical to SEQ ID NO: 147
  Description of Artificial Sequence: Synthetic polypeptide

SEQ ID NO: 3384 - protein, 107 aa, Artificial Sequence; identical to SEQ ID NO: 141
  Description of Artificial Sequence: Synthetic polypeptide

SEQ ID NO: 3385 - protein, 107 aa, Artificial Sequence; identical to SEQ ID NO: 81
  Description of Artificial Sequence: Synthetic polypeptide

SEQ ID NO: 3386 - protein, 107 aa, Artificial Sequence; identical to SEQ ID NO: 90
  Description of Artificial Sequence: Synthetic polypeptide

SEQ ID NO: 3387 - protein, 107 aa, Artificial Sequence; identical to SEQ ID NO: 102
  Description of Artificial Sequence: Synthetic polypeptide

SEQ ID NO: 3388 - protein, 107 aa, Artificial Sequence; identical to SEQ ID NO: 99
  Description of Artificial Sequence: Synthetic polypeptide

SEQ ID NO: 3389 - protein, 107 aa, Artificial Sequence; identical to SEQ ID NO: 108
  Description of Artificial Sequence: Synthetic polypeptide

SEQ ID NO: 3390 - protein, 119 aa, Artificial Sequence; identical to SEQ ID NO: 221
  Description of Artificial Sequence: Synthetic polypeptide

SEQ ID NO: 3391 - protein, 119 aa, Artificial Sequence; identical to SEQ ID NO: 223
  Description of Artificial Sequence: Synthetic polypeptide

SEQ ID NO: 3392 - protein, 119 aa, Artificial Sequence; identical to SEQ ID NO: 225
  Description of Artificial Sequence: Synthetic polypeptide

SEQ ID NO: 3393 - protein, 119 aa, Artificial Sequence; identical to SEQ ID NO: 219
  Description of Artificial Sequence: Synthetic polypeptide

SEQ ID NO: 3394 - protein, 119 aa, Artificial Sequence; identical to SEQ ID NO: 217
  Description of Artificial Sequence: Synthetic polypeptide

SEQ ID NO: 3395 - protein, 119 aa, Artificial Sequence; identical to SEQ ID NO: 211
  Description of Artificial Sequence: Synthetic polypeptide

SEQ ID NO: 3396 - protein, 119 aa, Artificial Sequence; identical to SEQ ID NO: 215
  Description of Artificial Sequence: Synthetic polypeptide

SEQ ID NO: 3397 - protein, 119 aa, Artificial Sequence; identical to SEQ ID NO: 213
  Description of Artificial Sequence: Synthetic polypeptide

SEQ ID NO: 3398 - protein, 119 aa, Artificial Sequence; identical to SEQ ID NO: 207
  Description of Artificial Sequence: Synthetic polypeptide

SEQ ID NO: 3399 - protein, 119 aa, Artificial Sequence; identical to SEQ ID NO: 209
  Description of Artificial Sequence: Synthetic polypeptide

SEQ ID NO: 3400 - protein, 119 aa, Artificial Sequence; identical to SEQ ID NO: 121
  Description of Artificial Sequence: Synthetic polypeptide

SEQ ID NO: 3401 - protein, 119 aa, Artificial Sequence; identical to SEQ ID NO: 182
  Description of Artificial Sequence: Synthetic polypeptide

SEQ ID NO: 3402 - protein, 119 aa, Artificial Sequence; identical to SEQ ID NO: 176
  Description of Artificial Sequence: Synthetic polypeptide

SEQ ID NO: 3403 - protein, 119 aa, Artificial Sequence; identical to SEQ ID NO: 158
  Description of Artificial Sequence: Synthetic polypeptide

SEQ ID NO: 3404 - protein, 119 aa, Artificial Sequence; identical to SEQ ID NO: 155
  Description of Artificial Sequence: Synthetic polypeptide

SEQ ID NO: 3405 - protein, 119 aa, Artificial Sequence; identical to SEQ ID NO: 118
  Description of Artificial Sequence: Synthetic polypeptide

SEQ ID NO: 3406 - protein, 119 aa, Artificial Sequence; identical to SEQ ID NO: 82
  Description of Artificial Sequence: Synthetic polypeptide

SEQ ID NO: 3407 - protein, 119 aa, Artificial Sequence; identical to SEQ ID NO: 106
  Description of Artificial Sequence: Synthetic polypeptide

SEQ ID NO: 3408 - protein, 119 aa, Artificial Sequence; identical to SEQ ID NO: 200
  Description of Artificial Sequence: Synthetic polypeptide

SEQ ID NO: 3409 - protein, 119 aa, Artificial Sequence; identical to SEQ ID NO: 124
  Description of Artificial Sequence: Synthetic polypeptide

SEQ ID NO: 3410 - protein, 119 aa, Artificial Sequence; identical to SEQ ID NO: 94
  Description of Artificial Sequence: Synthetic polypeptide

SEQ ID NO: 3411 - protein, 119 aa, Artificial Sequence; identical to SEQ ID NO: 151
  Description of Artificial Sequence: Synthetic polypeptide

SEQ ID NO: 3412 - protein, 119 aa, Artificial Sequence; identical to SEQ ID NO: 197
  Description of Artificial Sequence: Synthetic polypeptide

SEQ ID NO: 3413 - protein, 119 aa, Artificial Sequence; identical to SEQ ID NO: 130
  Description of Artificial Sequence: Synthetic polypeptide

SEQ ID NO: 3414 - protein, 119 aa, Artificial Sequence; identical to SEQ ID NO: 173
  Description of Artificial Sequence: Synthetic polypeptide

SEQ ID NO: 3415 - protein, 119 aa, Artificial Sequence; identical to SEQ ID NO: 142
  Description of Artificial Sequence: Synthetic polypeptide

SEQ ID NO: 3416 - protein, 119 aa, Artificial Sequence; identical to SEQ ID NO: 91
  Description of Artificial Sequence: Synthetic polypeptide

SEQ ID NO: 3417 - protein, 119 aa, Artificial Sequence; identical to SEQ ID NO: 139
  Description of Artificial Sequence: Synthetic polypeptide

SEQ ID NO: 3418 - protein, 119 aa, Artificial Sequence; identical to SEQ ID NO: 185
  Description of Artificial Sequence: Synthetic polypeptide

SEQ ID NO: 3419 - protein, 119 aa, Artificial Sequence; identical to SEQ ID NO: 133
  Description of Artificial Sequence: Synthetic polypeptide

SEQ ID NO: 3420 - protein, 119 aa, Artificial Sequence; identical to SEQ ID NO: 188
  Description of Artificial Sequence: Synthetic polypeptide

SEQ ID NO: 3421 - protein, 119 aa, Artificial Sequence; identical to SEQ ID NO: 109
  Description of Artificial Sequence: Synthetic polypeptide

SEQ ID NO: 3422 - protein, 119 aa, Artificial Sequence; identical to SEQ ID NO: 97
  Description of Artificial Sequence: Synthetic polypeptide

SEQ ID NO: 3423 - protein, 119 aa, Artificial Sequence; identical to SEQ ID NO: 85
  Description of Artificial Sequence: Synthetic polypeptide

SEQ ID NO: 3424 - protein, 119 aa, Artificial Sequence; identical to SEQ ID NO: 115
  Description of Artificial Sequence: Synthetic polypeptide

SEQ ID NO: 3425 - protein, 119 aa, Artificial Sequence; identical to SEQ ID NO: 191
  Description of Artificial Sequence: Synthetic polypeptide

SEQ ID NO: 3426 - protein, 119 aa, Artificial Sequence; identical to SEQ ID NO: 136
  Description of Artificial Sequence: Synthetic polypeptide

SEQ ID NO: 3427 - protein, 119 aa, Artificial Sequence; identical to SEQ ID NO: 203
  Description of Artificial Sequence: Synthetic polypeptide

SEQ ID NO: 3428 - protein, 119 aa, Artificial Sequence; identical to SEQ ID NO: 103
  Description of Artificial Sequence: Synthetic polypeptide

SEQ ID NO: 3429 - protein, 119 aa, Artificial Sequence; identical to SEQ ID NO: 205
  Description of Artificial Sequence: Synthetic polypeptide

SEQ ID NO: 3430 - protein, 119 aa, Artificial Sequence; identical to SEQ ID NO: 100
  Description of Artificial Sequence: Synthetic polypeptide

SEQ ID NO: 3431 - protein, 119 aa, Artificial Sequence; identical to SEQ ID NO: 179
  Description of Artificial Sequence: Synthetic polypeptide

SEQ ID NO: 3432 - protein, 119 aa, Artificial Sequence; identical to SEQ ID NO: 88
  Description of Artificial Sequence: Synthetic polypeptide

SEQ ID NO: 3433 - protein, 119 aa, Artificial Sequence; identical to SEQ ID NO: 167
  Description of Artificial Sequence: Synthetic polypeptide

SEQ ID NO: 3434 - protein, 119 aa, Artificial Sequence; identical to SEQ ID NO: 161
  Description of Artificial Sequence: Synthetic polypeptide

SEQ ID NO: 3435 - protein, 119 aa, Artificial Sequence; identical to SEQ ID NO: 145
  Description of Artificial Sequence: Synthetic polypeptide

SEQ ID NO: 3436 - protein, 119 aa, Artificial Sequence; identical to SEQ ID NO: 148
  Description of Artificial Sequence: Synthetic polypeptide

SEQ ID NO: 3437 - protein, 27 aa, Artificial Sequence
  Description of Artificial Sequence: Synthetic peptide
  SITE (2)..(26): This sequence may encompass 2-5 "Glu Ala Ala Ala Lys" repeating units
AEAAAKEAAAKEAAAKEAAAKEAAAKA

SEQ ID NO: 3438 - protein, 117 aa, Artificial Sequence; identical to SEQ ID NO: 24
  Description of Artificial Sequence: Synthetic polypeptide

SEQ ID NO: 3439 - protein, 116 aa, Artificial Sequence
  Description of Artificial Sequence: Synthetic polypeptide
EVQLLESGGGLVQPGGSLRLSCAASGFTFSSYAMSWVRQAPGKGLEWVSAISGSGGSTYYADSVKGRFTISRDNSKNTLYLQMNSLRAEDTAVYYCAKVLGWFDYWGQGTLVTVSS

SEQ ID NO: 3440 - protein, 109 aa, Artificial Sequence
  Description of Artificial Sequence: Synthetic polypeptide
EIVLTQSPGTLSLSPGERATLSCRASQSVSSSYLAWYQQKPGQAPRLLIYGASSRATGIPDRFSGSGSGTDFTLTISRLEPEDFAVYYCQQYGYPPDFTFGQGTKVEIK

SEQ ID NO: 3441 - protein, 119 aa, Artificial Sequence
  Description of Artificial Sequence: Synthetic polypeptide
EVQLLESGGGLVQPGGSLRLSCAASGFTFSSYAMSWVRQAPGKGLEWVSAISGSGGSTYYADSVKGRFTISRDNSKNTLYLQMNSLRAEDTAVYYCAKVAPYFAPFDYWGQGTLVTVSS

SEQ ID NO: 3442 - protein, 109 aa, Artificial Sequence
  Description of Artificial Sequence: Synthetic polypeptide
EIVLTQSPGTLSLSPGERATLSCRASQSVSSSYLAWYQQKPGQAPRLLIYGASSRATGIPDRFSGSGSGTDFTLTISRLEPEDFAVYYCQQYGNPPLYTFGQGTKVEIK

SEQ ID NO: 3443 - protein, 116 aa, Artificial Sequence
  Description of Artificial Sequence: Synthetic polypeptide
EVQLVQSGAEVKKPGESLKISCKGSGYSFTSYWIGWVRQMPGKGLEWMGIIYPGDSDTRYSPSFQGQVTISADKSISTAYLQWSSLKASDTAMYYCARNGYLGDYWGQGTLVTVSS

SEQ ID NO: 3444 - protein, 111 aa, Artificial Sequence
  Description of Artificial Sequence: Synthetic polypeptide
DIVMTQSPLSLPVTPGEPASISCRSSQSLLHSNGYNYLDWYLQKPGQSPQLLIYLGSNRASGVPDRFSGSGSGTDFTLKISRVEAEDVGVYYCMQAMQIPTFGQGTKVEIK

SEQ ID NO: 3445 - protein, 120 aa, Artificial Sequence
  Description of Artificial Sequence: Synthetic polypeptide
QVQLQQSGGGLVQPGGSLKLSCAASGIDFSRYWMSWVRRAPGKGLEWIGEINPDSSTINYAPSLKDKFIISRDNAKNTLYLQMSKVRSEDTALYYCASLYYDYGDAMDYWGQGTSVTVSS

SEQ ID NO: 3446 - protein, 108 aa, Artificial Sequence
  Description of Artificial Sequence: Synthetic polypeptide
DIVMTQSQRFMTTSVGDRVSVTCKASQSVDSNVAWYQQKPRQSPKALIFSASLRFSGVPARFTGSGSGTDFTLTISNLQSEDLAEYFCQQYNNYPLTFGAGTKLELKR

SEQ ID NO: 3447 - protein, 123 aa, Artificial Sequence
  Description of Artificial Sequence: Synthetic polypeptide
EVQLVESGGGLVKPGGSLRLSCAASGFTFGDYALSWFRQAPGKGLEWVGVSRSKAYGGTTDYAASVKGRFTISRDDSKSTAYLQMNSLKTEDTAVYYCASSGYSSGWTPFDYWGQGTLVTVSS

SEQ ID NO: 3448 - protein, 111 aa, Artificial Sequence
  Description of Artificial Sequence: Synthetic polypeptide
QSVLTQPPSASGTPGQRVTISCSGSSSNIGSNTVNWYQQLPGTAPKLLIFNYHQRPSGVPDRFSGSKSGSSASLAISGLQSEDEADYYCAAWDDSLNGWVFGGGTKLTVLG

SEQ ID NO: 3449 - protein, 101 aa, Artificial Sequence
  Description of Artificial Sequence: Synthetic polypeptide
IAGITQAPTSQILAAGRRMTLRCTQDMRHNAMYWYRQDLGLGLRLIHYSNTAGTTGKGEVPDGYSVSRANTDDFPLTLASAVPSQTSVYFCASSWSFGTEA

SEQ ID NO: 3450 - protein, 100 aa, Artificial Sequence
  Description of Artificial Sequence: Synthetic polypeptide
GVTQTPKFQVLKTGQSMTLQCAQDMNHEYMSWYRQDPGMGLRLIHYSVGAGITDQGEVPNGYNVSRSTTEDFPLRLLSAAPSQTSVYFCASSYVGNTGEL

SEQ ID NO: 3451 - protein, 100 aa, Artificial Sequence
  Description of Artificial Sequence: Synthetic polypeptide
KVTQSSRYLVKRTGEKVFLECVQDMDHENMFWYRQDPGLGLRLIYFSYDVKMKEKGDIPEGYSVSREKKERFSLILASASTDQTSMYLCASSFLGTGVEQ

SEQ ID NO: 3452 - protein, 100 aa, Artificial Sequence
  Description of Artificial Sequence: Synthetic polypeptide
GGITQSPKYLFRKEGQNVTLSCEQNLNHDAMYWYRQDPGQGLRLIYYSQIVNDFQKGDIAEGYSVSREKKESFPLTVTSAQKNPTAFYLCASSSRSSYEQ

SEQ ID NO: 3453 - protein, 101 aa, Artificial Sequence
  Description of Artificial Sequence: Synthetic polypeptide
GVTQTPKHLITATGQRVTLRCSPRSGDLSVYWYQQSLDQGLQFLIQYYNGEERAKGNILERFSAQQFPDLHSELNLSSLELGDSALYFCASSVAGTPSYEQ

SEQ ID NO: 3454 - protein, 100 aa, Artificial Sequence
  Description of Artificial Sequence: Synthetic polypeptide
AGVTQTPRYLIKTRGQQVTLSCSPISGHRSVSWYQQTPGQGLQFLFEYFSETQRNKGNFPGRFSGRQFSNSRSEMNVSTLELGDSALYLCASSFNMATGQ

SEQ ID NO: 3455 - protein, 99 aa, Artificial Sequence
  Description of Artificial Sequence: Synthetic polypeptide
AVVSQHPSRVIVKSGTSVKIECRSLDFQATTMFWYRQFPSLMLMATSNEGSKATYEQGVEKDKFLINHASLTLSTLTVTSAHPEDSGFYICSALAGDTQ

SEQ ID NO: 3456 - protein, 106 aa, Artificial Sequence
  Description of Artificial Sequence: Synthetic polypeptide
MDAGVIQSPRHEVTEMGQQVTLRCKPISGHDYLFWYRQTMMRGLELLIYFNNNVPIDDSGMPEDRFSAKMPNASFSTLKIQPSEPRDSAVYFCASSLWEKLAKNIQ

SEQ ID NO: 3457 - protein, 28 aa, Artificial Sequence
  Description of Artificial Sequence: Synthetic peptide
DTGITQTPKYLVTAMGSKRTMKREHLGH

SEQ ID NO: 3458 - protein, 22 aa, Artificial Sequence
  Description of Artificial Sequence: Synthetic peptide
DSMYWYRQKAKKSLEFMFYYNC

SEQ ID NO: 3459 - protein, 10 aa, Artificial Sequence
  Description of Artificial Sequence: Synthetic peptide
KEFIENKTVP

SEQ ID NO: 3460 - protein, 8 aa, Artificial Sequence
  Description of Artificial Sequence: Synthetic peptide
NHFTPECP

SEQ ID NO: 3461 - protein, 26 aa, Artificial Sequence
  Description of Artificial Sequence: Synthetic peptide
DSSRLYLHVVALQQEDSAAYLCTSSQ

SEQ ID NO: 3462 - protein, 29 aa, Artificial Sequence
  Description of Artificial Sequence: Synthetic peptide
EPEVTQTPSHQVTQMGQEVILRCVPISNH

SEQ ID NO: 3463 - protein, 22 aa, Artificial Sequence
  Description of Artificial Sequence: Synthetic peptide
LYFYWYRQILGQKVEFLVSFYN

SEQ ID NO: 3464 - protein, 19 aa, Artificial Sequence
  Description of Artificial Sequence: Synthetic peptide
NEISEKSEIFDDQFSVERP

SEQ ID NO: 3465 - protein, 26 aa, Artificial Sequence
  Description of Artificial Sequence: Synthetic peptide
DGSNFTLKIRSTKLEDSAMYFCASSE

SEQ ID NO: 3466 - protein, 29 aa, Artificial Sequence
  Description of Artificial Sequence: Synthetic peptide
DTAVSQTPKYLVTQMGNDKSIKCEQNLGH

SEQ ID NO: 3467 - protein, 22 aa, Artificial Sequence
  Description of Artificial Sequence: Synthetic peptide
DTMYWYKQDSKKFLKIMFSYNN

SEQ ID NO: 3468 - protein, 10 aa, Artificial Sequence
  Description of Artificial Sequence: Synthetic peptide
KELIINETVP

SEQ ID NO: 3469 - protein, 8 aa, Artificial Sequence
  Description of Artificial Sequence: Synthetic peptide
NRFSPKSP

SEQ ID NO: 3470 - protein, 26 aa, Artificial Sequence
  Description of Artificial Sequence: Synthetic peptide
DKAHLNLHINSLELGDSAVYFCASSQ

SEQ ID NO: 3471 - protein, 29 aa, Artificial Sequence
  Description of Artificial Sequence: Synthetic peptide
  MOD_RES (23)..(23): Any amino acid or absent
DTAVSQTPKYLVTQMGKKESLKXEQNLGH

SEQ ID NO: 3472 - protein, 22 aa, Artificial Sequence
  Description of Artificial Sequence: Synthetic peptide
NAMYWYKQDSKKFLKTMFIYSN

SEQ ID NO: 3473 - protein, 10 aa, Artificial Sequence
  Description of Artificial Sequence: Synthetic peptide
KEPILNETVP

SEQ ID NO: 3474 - protein, 8 aa, Artificial Sequence
  Description of Artificial Sequence: Synthetic peptide
NRFSPDSP

SEQ ID NO: 3475 - protein, 26 aa, Artificial Sequence
  Description of Artificial Sequence: Synthetic peptide
DKAHLNLHINSLELGDSAVYFCASSQ

SEQ ID NO: 3476 - protein, 29 aa, Artificial Sequence
  Description of Artificial Sequence: Synthetic peptide
DTEVTQTPKHLVMGMTNKKSLKCEQHMGH

SEQ ID NO: 3477 - protein, 22 aa, Artificial Sequence
  Description of Artificial Sequence: Synthetic peptide
RAMYWYKQKAKKPPELMFVYSY

SEQ ID NO: 3478 - protein, 10 aa, Artificial Sequence
  Description of Artificial Sequence: Synthetic peptide
EKLSINESVP

SEQ ID NO: 3479 - protein, 8 aa, Artificial Sequence
  Description of Artificial Sequence: Synthetic peptide
SRFSPECP

SEQ ID NO: 3480 - protein, 26 aa, Artificial Sequence
  Description of Artificial Sequence: Synthetic peptide
NSSLLNLHLHALQPEDSALYLCASSQ

SEQ ID NO: 3481 - protein, 29 aa, Artificial Sequence
  Description of Artificial Sequence: Synthetic peptide
ETGVTQTPRHLVMGMTNKKSLKCEQHLGH

SEQ ID NO: 3482 - protein, 22 aa, Artificial Sequence
  Description of Artificial Sequence: Synthetic peptide
NAMYWYKQSAKKPLELMFVYNF

SEQ ID NO: 3483 - protein, 10 aa, Artificial Sequence
  Description of Artificial Sequence: Synthetic peptide
KEQTENNSVP

SEQ ID NO: 3484 - protein, 8 aa, Artificial Sequence
  Description of Artificial Sequence: Synthetic peptide
SRFSPECP

SEQ ID NO: 3485 - protein, 26 aa, Artificial Sequence
  Description of Artificial Sequence: Synthetic peptide
NSSHLFLHLHTLQPEDSALYLCASSQ

SEQ ID NO: 3486 - protein, 29 aa, Artificial Sequence
  Description of Artificial Sequence: Synthetic peptide
ETGVTQTPRHLVMGMTNKKSLKCEQHLGH

SEQ ID NO: 3487 - protein, 22 aa, Artificial Sequence
  Description of Artificial Sequence: Synthetic peptide
NAMYWYKQSAKKPLELMFVYSL

SEQ ID NO: 3488 - protein, 10 aa, Artificial Sequence
  Description of Artificial Sequence: Synthetic peptide
EERVENNSVP

SEQ ID NO: 3489 - protein, 8 aa, Artificial Sequence
  Description of Artificial Sequence: Synthetic peptide
SRFSPECP

SEQ ID NO: 3490 - protein, 26 aa, Artificial Sequence
  Description of Artificial Sequence: Synthetic peptide
NSSHLFLHLHTLQPEDSALYLCASSQ

SEQ ID NO: 3491 - protein, 29 aa, Artificial Sequence
  Description of Artificial Sequence: Synthetic peptide
KAGVTQTPRYLIKTRGQQVTLSCSPISGH

SEQ ID NO: 3492 - protein, 22 aa, Artificial Sequence
  Description of Artificial Sequence: Synthetic peptide
RSVSWYQQTPGQGLQFLFEYFS

SEQ ID NO: 3493 - protein, 10 aa, Artificial Sequence
  Description of Artificial Sequence: Synthetic peptide
ETQRNKGNFP

SEQ ID NO: 3494 - protein, 8 aa, Artificial Sequence
  Description of Artificial Sequence: Synthetic peptide
GRFSGRQF

SEQ ID NO: 3495 - protein, 26 aa, Artificial Sequence
  Description of Artificial Sequence: Synthetic peptide
SNSRSEMNVSTLELGDSALYLCASSL

SEQ ID NO: 3496 - protein, 29 aa, Artificial Sequence
  Description of Artificial Sequence: Synthetic peptide
EAGVTQSPTHLIKTRGQQVTLRCSPISGH

SEQ ID NO: 3497 - protein, 22 aa, Artificial Sequence
  Description of Artificial Sequence: Synthetic peptide
SSVSWYQQAPGQGPQFIFEYAN

SEQ ID NO: 3498 - protein, 10 aa, Artificial Sequence
  Description of Artificial Sequence: Synthetic peptide
ELRRSEGNFP

SEQ ID NO: 3499 - protein, 8 aa, Artificial Sequence
  Description of Artificial Sequence: Synthetic peptide
NRFSGRQF

SEQ ID NO: 3500 - protein, 26 aa, Artificial Sequence
  Description of Artificial Sequence: Synthetic peptide
HDCCSEMNVSALELGDSALYLCARSL

SEQ ID NO: 3501 - protein, 29 aa, Artificial Sequence
  Description of Artificial Sequence: Synthetic peptide
ETGVTQSPTHLIKTRGQQVTLRCSSQSGH

SEQ ID NO: 3502 - protein, 22 aa, Artificial Sequence
  Description of Artificial Sequence: Synthetic peptide
NTVSWYQQALGQGPQFIFQYYR

SEQ ID NO: 3503 - protein, 10 aa, Artificial Sequence
  Description of Artificial Sequence: Synthetic peptide
EEENGRGNFP

SEQ ID NO: 3504 - protein, 8 aa, Artificial Sequence
  Description of Artificial Sequence: Synthetic peptide
PRFSGLQF

SEQ ID NO: 3505 - protein, 26 aa, Artificial Sequence
  Description of Artificial Sequence: Synthetic peptide
PNYSSELNVNALELDDSALYLCASSL

SEQ ID NO: 3506 - protein, 29 aa, Artificial Sequence
  Description of Artificial Sequence: Synthetic peptide
DAGVTQSPTHLIKTRGQQVTLRCSPISGH

SEQ ID NO: 3507 - protein, 22 aa, Artificial Sequence
  Description of Artificial Sequence: Synthetic peptide
KSVSWYQQVLGQGPQFIFQYYE

SEQ ID NO: 3508 - protein, 10 aa, Artificial Sequence
  Description of Artificial Sequence: Synthetic peptide
KEERGRGNFP

SEQ ID NO: 3509 - protein, 8 aa, Artificial Sequence
  Description of Artificial Sequence: Synthetic peptide
DRFSARQF

SEQ ID NO: 3510 - protein, 26 aa, Artificial Sequence
  Description of Artificial Sequence: Synthetic peptide
PNYSSELNVNALLLGDSALYLCASSL

SEQ ID NO: 3511 - protein, 29 aa, Artificial Sequence
  Description of Artificial Sequence: Synthetic peptide
DAGVTQSPTHLIKTRGQQVTLRCSPKSGH

SEQ ID NO: 3512 - protein, 22 aa, Artificial Sequence
  Description of Artificial Sequence: Synthetic peptide
DTVSWYQQALGQGPQFIFQYYE

SEQ ID NO: 3513 - protein, 10 aa, Artificial Sequence
  Description of Artificial Sequence: Synthetic peptide
EEERQRGNFP

SEQ ID NO: 3514 - protein, 8 aa, Artificial Sequence
  Description of Artificial Sequence: Synthetic peptide
DRFSGHQF

SEQ ID NO: 3515 - protein, 26 aa, Artificial Sequence
  Description of Artificial Sequence: Synthetic peptide
PNYSSELNVNALLLGDSALYLCASSL

SEQ ID NO: 3516 - protein, 29 aa, Artificial Sequence
  Description of Artificial Sequence: Synthetic peptide
DAGVTQSPTHLIKTRGQHVTLRCSPISGH

SEQ ID NO: 3517 - protein, 449 aa, Artificial Sequence
  Description of Artificial Sequence: Synthetic polypeptide
QVQLVQSGAEVKKPGSSVKVSCKASGHDFRLTYIHWVRQAPGQGLEWMGRVSAGSGNVKYNEKFKGRVTITADTSTSTAYMELSSLRSEDTAVYYCAVSYYSYDVLDYWGQGTTVTVSSASTKGPSVFPLAPSSKSTSGGTAALGCLVKDYFPEPVTVSWNSGALTSGVHTFPAVLQSSGLYSLSSVVTVPSSSLGTQTYICNVNHKPSNTKVDKRVEPKSCDKTHTCPPCPAPELLGGPSVFLFPPKPKDTLMISRTPEVTCVVVDVSHEDPEVKFNWYVDGVEVHNAKTKPREEQYASTYRVVSVLTVLHQDWLNGKEYKCKVSNKALPAPIEKTISKAKGQPREPQVCTLPPSREEMTKNQVSLSCAVKGFYPSDIAVEWESNGQPENNYKTTPPVLDSDGSFFLVSKLTVDKSRWQQGNVFSCSVMHEALHNHYTQKSLSLSPGK

SEQ ID NO: 3518 - protein, 214 aa, Artificial Sequence
  Description of Artificial Sequence: Synthetic polypeptide
DIQMTQSPSFLSASVGDRVTITCKASQNVADRVVWHQQKPGKAPKALIYSSSHRYKGVPSRFSGSGSGTEFTLTISSLQPEDFATYFCQQFKSYPLTFGQGTKLEIKRTVAAPSVFIFPPSDEQLKSGTASVVCLLNNFYPREAKVQWKVDNALQSGNSQESVTEQDSKDSTYSLSSTLTLSKADYEKHKVYACEVTHQGLSSPVTKSFNRGEC

SEQ ID NO: 3519 - protein, 448 aa, Artificial Sequence
  Description of Artificial Sequence: Synthetic polypeptide
ITCPPPMSVEHADIWVKSYSLYSRERYICNSGFKRKAGTSSLTECVLNKATNVAHWTTPSLKCIRDPALVHQRPAPPSGGSGGGGSGGGSGGGGSGGNWVNVISDLKKIEDLIQSMHIDATLYTESDVHPSCKVTAMKCFLLELQVISLESGDASIHDTVENLIILANNSLSSNGNVTESGCKECEELEEKNIKEFLQSFVHIVQMFINTSGGGGSGGGGSDKTHTCPPCPAPELLGGPSVFLFPPKPKDTLMISRTPEVTCVVVDVSHEDPEVKFNWYVDGVEVHNAKTKPREEQYASTYRVVSVLTVLHQDWLNGKEYKCKVSNKALPAPIEKTISKAKGQPREPQVYTLPPCREEMTKNQVSLWCLVKGFYPSDIAVEWESNGQPENNYKTTPPVLDSDGSFFLYSKLTVDKSRWQQGNVFSCSVMHEALHNHYTQKSLSLSPGK

SEQ ID NO: 3520 - protein, 351 aa, Artificial Sequence
  Description of Artificial Sequence: Synthetic polypeptide
NWVNVISDLKKIEDLIQSMHIDATLYTESDVHPSCKVTAMKCFLLELQVISLESGDASIHDTVENLIILANNSLSSNGNVTESGCKECEELEEKNIKEFLQSFVHIVQMFINTSGGGGSGGGGSDKTHTCPPCPAPELLGGPSVFLFPPKPKDTLMISRTPEVTCVVVDVSHEDPEVKFNWYVDGVEVHNAKTKPREEQYASTYRVVSVLTVLHQDWLNGKEYKCKVSNKALPAPIEKTISKAKGQPREPQVYTLPPCREEMTKNQVSLWCLVKGFYPSDIAVEWESNGQPENNYKTTPPVLDSDGSFFLYSKLTVDKSRWQQGNVFSCSVMHEALHNHYTQKSLSLSPGK

SEQ ID NO: 3521 - protein, 370 aa, Artificial Sequence
  Description of Artificial Sequence: Synthetic polypeptide
APTSSSTKKTQLQLEHLLLDLQMILNGINNYKNPKLTRMLTFKFYMPKKATELKHLQCLEEELKPLEEVLNLAQSKNFHLRPRDLISNINVIVLELKGSETTFMCEYADETATIVEFLNRWITFAQSIISTLTGGGGSGGGGSDKTHTCPPCPAPELLGGPSVFLFPPKPKDTLMISRTPEVTCVVVDVSHEDPEVKFNWYVDGVEVHNAKTKPREEQYASTYRVVSVLTVLHQDWLNGKEYKCKVSNKALPAPIEKTISKAKGQPREPQVYTLPPCREEMTKNQVSLWCLVKGFYPSDIAVEWESNGQPENNYKTTPPVLDSDGSFFLYSKLTVDKSRWQQGNVFSCSVMHEALHNHYTQKSLSLSPGK

SEQ ID NO: 3522 - protein, 22 aa, Artificial Sequence
  Description of Artificial Sequence: Synthetic peptide
TSVYWYQQALGLGLQFLLWYDE

SEQ ID NO: 3523 - protein, 77 aa, Artificial Sequence
  Description of Artificial Sequence: Synthetic polypeptide
ITCPPPMSVEHADIWVKSYSLYSRERYICNSGFKRKAGTSSLTECVLNKATNVAHWTTPSLKCIRDPALVHQRPAPP

SEQ ID NO: 3524 - protein, 20 aa, Artificial Sequence
  Description of Artificial Sequence: Synthetic peptide
SGGSGGGGSGGGSGGGGSGG

SEQ ID NO: 3525 - protein, 26 aa, Artificial Sequence
  Description of Artificial Sequence: Synthetic peptide
PNYSSELNVNALELEDSALYLCASSL

SEQ ID NO: 3526 - protein, 220 aa, Artificial Sequence
  Description of Artificial Sequence: Synthetic polypeptide
DIVMSQSPSSLAVSVGEKVTMSCKSSQSLLYSGNQKNYLAWYQQKPGQSPKLLIYWASTRESGVPDRFTGSGSGTDFTLTINSVKAEDLTVYYCQQYYGYPRTFGGGTKVEIKRADAAPTVSIFPPSSEQLTSGGASVVCFLNNFYPKDINVKWKIDGSERQNGVLNSWTDQDSKDSTYSMSSTLTLTKDEYERHNSYTCEATHKTSTSPIVKSFNRNEC

SEQ ID NO: 3527 - protein, 113 aa, Artificial Sequence
  Description of Artificial Sequence: Synthetic polypeptide
DIVMSQSPSSLAVSVGEKVTMSCKSSQSLLYSGNQKNYLAWYQQKPGQSPKLLIYWASTRESGVPDRFTGSGSGTDFTLTINSVKAEDLTVYYCQQYYGYPRTFGGGTKVEIK

SEQ ID NO: 3528 - protein, 107 aa, Artificial Sequence
  Description of Artificial Sequence: Synthetic polypeptide
RADAAPTVSIFPPSSEQLTSGGASVVCFLNNFYPKDINVKWKIDGSERQNGVLNSWTDQDSKDSTYSMSSTLTLTKDEYERHNSYTCEATHKTSTSPIVKSFNRNEC

SEQ ID NO: 3529 - protein, 452 aa, Artificial Sequence
  Description of Artificial Sequence: Synthetic polypeptide
QVQLQQSGTELMKPGASVKISCKASGYTFSNYWIEWIKQRPGHGLEWVGEILPGAGPTNYNEKFKGKATFTADSSSNTAYMQLSSLTSEDSAVYYCARTDYDYDWFAYWGQGTLVTVSAAKTTAPSVYPLAPVSGDTTGSSVTLGCLVKGYFPEPVTLTWNSGSLSSGVHTFPAVLQSDLYTLSSSVTVTSSTWPSQSITCNVAHPASSTKVDKKIEPKSCDKTHTCPPCPAPNAAGGPSVFIFPPKIKDVLMISLSPIVTCVVVDVSEDDPDVQISWFVNNVEVHTAQTQTHREDYNSTLRVVSALPIQHQDWMSGKEFKCKVNNKDLGAPIERTISKPKGSVRAPQVCVLPPPEEEMTKKQVTLSCAVTDFMPEDIYVEWTNNGKTELNYKNTEPVLDSDGSYFMVSKLRVEKKNWVERNSYSCSVVHEGLHNHHTTKSFSRTPGKEPEA

SEQ ID NO: 3530 - protein, 192 aa, Artificial Sequence
  Description of Artificial Sequence: Synthetic polypeptide
QVQLQQSGTELMKPGASVKISCKASGYTFSNYWIEWIKQRPGHGLEWVGEILPGAGPTNYNEKFKGKATFTADSSSNTAYMQLSSLTSEDSAVYYCARTDYDYDWFAYWGQGTLVTVSAAKTTAPSVYPLAPVSGDTTGSSVTLGCLVKGYFPEPVTLTWNSGSLSSGVHTFPAVLQSDLYTLSSSVTVTSS

SEQ ID NO: 3531 - protein, 256 aa, Artificial Sequence
  Description of Artificial Sequence: Synthetic polypeptide
TWPSQSITCNVAHPASSTKVDKKIEPKSCDKTHTCPPCPAPNAAGGPSVFIFPPKIKDVLMISLSPIVTCVVVDVSEDDPDVQISWFVNNVEVHTAQTQTHREDYNSTLRVVSALPIQHQDWMSGKEFKCKVNNKDLGAPIERTISKPKGSVRAPQVCVLPPPEEEMTKKQVTLSCAVTDFMPEDIYVEWTNNGKTELNYKNTEPVLDSDGSYFMVSKLRVEKKNWVERNSYSCSVVHEGLHNHHTTKSFSRTPGK

SEQ ID NO: 3532 - protein, 383 aa, Artificial Sequence
  Description of Artificial Sequence: Synthetic polypeptide
APTSSSTKKTQLQLEHLLLDLQMILNGINNYKNPKLTRMLTFKFYMPKKATELKHLQCLEEELKPLEEVLNLAQSKNFHLRPRDLISNINVIVLELKGSETTFMCEYADETATIVEFLNRWITFCQSIISTLTGGGGSGGGGSDKTHTCPPCPAPNAAGGPSVFIFPPKIKDVLMISLSPIVTCVVVDVSEDDPDVQISWFVNNVEVHTAQTQTHREDYNSTLRVVSALPIQHQDWMSGKEFKCKVNNKDLGAPIERTISKPKGSVRAPQVYVLPPCEEEMTKKQVTLWCMVTDFMPEDIYVEWTNNGKTELNYKNTEPVLDSDGSYFMYSKLRVEKKNWVERNSYSCSVVHEGLHNHHTTKSFSRTPGKGGGGSHHHHHHHH

SEQ ID NO: 3533 - protein, 227 aa, Artificial Sequence
  Description of Artificial Sequence: Synthetic polypeptide
DKTHTCPPCPAPNAAGGPSVFIFPPKIKDVLMISLSPIVTCVVVDVSEDDPDVQISWFVNNVEVHTAQTQTHREDYNSTLRVVSALPIQHQDWMSGKEFKCKVNNKDLGAPIERTISKPKGSVRAPQVYVLPPCEEEMTKKQVTLWCMVTDFMPEDIYVEWTNNGKTELNYKNTEPVLDSDGSYFMYSKLRVEKKNWVERNSYSCSVVHEGLHNHHTTKSFSRTPGK

SEQ ID NO: 3534 - protein, 13 aa, Artificial Sequence
  Description of Artificial Sequence: Synthetic peptide
GGGGSHHHHHHHH

SEQ ID NO: 3535 - protein, 368 aa, Artificial Sequence
  Description of Artificial Sequence: Synthetic polypeptide
DIVMSQSPSSLAVSVGEKVTMSCKSSQSLLYSGNQKNYLAWYQQKPGQSPKLLIYWASTRESGVPDRFTGSGSGTDFTLTINSVKAEDLTVYYCQQYYGYPRTFGGGTKVEIKRADAAPTVSIFPPSSEQLTSGGASVVCFLNNFYPKDINVKWKIDGSERQNGVLNSWTDQDSKDSTYSMSSTLTLTKDEYERHNSYTCEATHKTSTSPIVKSFNRNECGGGGSGGGGSGGGGSAPTSSSTKKTQLQLEHLLLDLQMILNGINNYKNPKLTRMLTFKFYMPKKATELKHLQCLEEELKPLEEVLNLAQSKNFHLRPRDLISNINVIVLELKGSETTFMCEYADETATIVEFLNRWITFCQSIISTLT

SEQ ID NO: 3536 - protein, 452 aa, Artificial Sequence
  Description of Artificial Sequence: Synthetic polypeptide
QVQLQQSGTELMKPGASVKISCKASGYTFSNYWIEWIKQRPGHGLEWVGEILPGAGPTNYNEKFKGKATFTADSSSNTAYMQLSSLTSEDSAVYYCARTDYDYDWFAYWGQGTLVTVSAAKTTAPSVYPLAPVSGDTTGSSVTLGCLVKGYFPEPVTLTWNSGSLSSGVHTFPAVLQSDLYTLSSSVTVTSSTWPSQSITCNVAHPASSTKVDKKIEPKSCDKTHTCPPCPAPNAAGGPSVFIFPPKIKDVLMISLSPIVTCVVVDVSEDDPDVQISWFVNNVEVHTAQTQTHREDYNSTLRVVSALPIQHQDWMSGKEFKCKVNNKDLGAPIERTISKPKGSVRAPQVYVLPPPEEEMTKKQVTLTCMVTDFMPEDIYVEWTNNGKTELNYKNTEPVLDSDGSYFMYSKLRVEKKNWVERNSYSCSVVHEGLHNHHTTKSFSRTPGKEPEA

SEQ ID NO: 3537 - protein, 260 aa, Artificial Sequence
  Description of Artificial Sequence: Synthetic polypeptide
TWPSQSITCNVAHPASSTKVDKKIEPKSCDKTHTCPPCPAPNAAGGPSVFIFPPKIKDVLMISLSPIVTCVVVDVSEDDPDVQISWFVNNVEVHTAQTQTHREDYNSTLRVVSALPIQHQDWMSGKEFKCKVNNKDLGAPIERTISKPKGSVRAPQVYVLPPPEEEMTKKQVTLTCMVTDFMPEDIYVEWTNNGKTELNYKNTEPVLDSDGSYFMYSKLRVEKKNWVERNSYSCSVVHEGLHNHHTTKSFSRTPGKEPEA

SEQ ID NO: 3538 - protein, 10 aa, Artificial Sequence
  Description of Artificial Sequence: Synthetic peptide
EGTTAKGEVP

SEQ ID NO: 3539 - protein, 389 aa, Artificial Sequence
  Description of Artificial Sequence: Synthetic polypeptide
DCDIEGKDGKQYESVLMVSIDQLLDSMKEIGSNCLNNEFNFFKRHICDANKEGMFLFRAARKLRQFLKMNSTGDFDLHLLKVSEGTTILLNCTGQVKGRKPAALGEAQPTKSLEENKSLKEQKKLNDLCFLKRLLQEIKTCWNKILMGTKEHGGGGSGGGGSDKTHTCPPCPAPELLGGPSVFLFPPKPKDTLMISRTPEVTCVVVDVSHEDPEVKFNWYVDGVEVHNAKTKPREEQYASTYRVVSVLTVLHQDWLNGKEYKCKVSNKALPAPIEKTISKAKGQPREPQVYTLPPCREEMTKNQVSLWCLVKGFYPSDIAVEWESNGQPENNYKTTPPVLDSDGSFFLYSKLTVDKSRWQQGNVFSCSVMHEALHNHYTQKSLSLSPGK

SEQ ID NO: 3540 - protein, 152 aa, Artificial Sequence
  Description of Artificial Sequence: Synthetic polypeptide
DCDIEGKDGKQYESVLMVSIDQLLDSMKEIGSNCLNNEFNFFKRHICDANKEGMFLFRAARKLRQFLKMNSTGDFDLHLLKVSEGTTILLNCTGQVKGRKPAALGEAQPTKSLEENKSLKEQKKLNDLCFLKRLLQEIKTCWNKILMGTKEH

SEQ ID NO: 3541 - protein, 755 aa, Artificial Sequence
  Description of Artificial Sequence: Synthetic polypeptide
IWELKKDVYVVELDWYPDAPGEMVVLTCDTPEEDGITWTLDQSSEVLGSGKTLTIQVKEFGDAGQYTCHKGGEVLSHSLLLLHKKEDGIWSTDILKDQKEPKNKTFLRCEAKNYSGRFTCWWLTTISTDLTFSVKSSRGSSDPQGVTCGAATLSAERVRGDNKEYEYSVECQEDSACPAAEESLPIEVMVDAVHKLKYENYTSSFFIRDIIKPDPPKNLQLKPLKNSRQVEVSWEYPDTWSTPHSYFSLTFCVQVQGKSKREKKDRVFTDKTSATVICRKNASISVRAQDRYYSSSWSEWASVPCSGGGGSGGGGSGGGGSRNLPVATPDPGMFPCLHHSQNLLRAVSNMLQKARQTLEFYPCTSEEIDHEDITKDKTSTVEACLPLELTKNESCLNSRETSFITNGSCLASRKTSFMMALCLSSIYEDLKMYQVEFKTMNAKLLMDPKRQIFLDQNMLAVIDELMQALNFNSETVPQKSSLEEPDFYKTKIKLCILLHAFRIRAVTIDRVMSYLNASGGGGSGGGGSDKTHTCPPCPAPELLGGPSVFLFPPKPKDTLMISRTPEVTCVVVDVSHEDPEVKFNWYVDGVEVHNAKTKPREEQYASTYRVVSVLTVLHQDWLNGKEYKCKVSNKALPAPIEKTISKAKGQPREPQVYTLPPCREEMTKNQVSLWCLVKGFYPSDIAVEWESNGQPENNYKTTPPVLDSDGSFFLYSKLTVDKSRWQQGNVFSCSVMHEALHNHYTQKSLSLSPGK

SEQ ID NO: 3542 - protein, 518 aa, Artificial Sequence; identical to SEQ ID NO: 2290
  Description of Artificial Sequence: Synthetic polypeptide

SEQ ID NO: 3543 - protein, 305 aa, Artificial Sequence
  Description of Artificial Sequence: Synthetic polypeptide
IWELKKDVYVVELDWYPDAPGEMVVLTCDTPEEDGITWTLDQSSEVLGSGKTLTIQVKEFGDAGQYTCHKGGEVLSHSLLLLHKKEDGIWSTDILKDQKEPKNKTFLRCEAKNYSGRFTCWWLTTISTDLTFSVKSSRGSSDPQGVTCGAATLSAERVRGDNKEYEYSVECQEDSACPAAEESLPIEVMVDAVHKLKYENYTSSFFIRDIIKPDPPKNLQLKPLKNSRQVEVSWEYPDTWSTPHSYFSLTFCVQVQGKSKREKKDRVFTDKTSATVICRKNASISVRAQDRYYSSSWSEWASVPC

SEQ ID NO: 3544 - protein, 16 aa, Artificial Sequence
  Description of Artificial Sequence: Synthetic peptide
SGGGGSGGGGSGGGGS

SEQ ID NO: 3545 - protein, 197 aa, Artificial Sequence
  Description of Artificial Sequence: Synthetic polypeptide
RNLPVATPDPGMFPCLHHSQNLLRAVSNMLQKARQTLEFYPCTSEEIDHEDITKDKTSTVEACLPLELTKNESCLNSRETSFITNGSCLASRKTSFMMALCLSSIYEDLKMYQVEFKTMNAKLLMDPKRQIFLDQNMLAVIDELMQALNFNSETVPQKSSLEEPDFYKTKIKLCILLHAFRIRAVTIDRVMSYLNAS

SEQ ID NO: 3546 - protein, 370 aa, Artificial Sequence
  Description of Artificial Sequence: Synthetic polypeptide
QGQDRHMIRMRQLIDIVDQLKNYVNDLVPEFLPAPEDVETNCEWSAFSCFQKAQLKSANTGNNERIINVSIKKLKRKPPSTNAGRRQKHRLTCPSCDSYEKKPPKEFLERFKSLLQKMIHQHLSSRTHGSEDSGGGGSGGGGSDKTHTCPPCPAPELLGGPSVFLFPPKPKDTLMISRTPEVTCVVVDVSHEDPEVKFNWYVDGVEVHNAKTKPREEQYASTYRVVSVLTVLHQDWLNGKEYKCKVSNKALPAPIEKTISKAKGQPREPQVYTLPPCREEMTKNQVSLWCLVKGFYPSDIAVEWESNGQPENNYKTTPPVLDSDGSFFLYSKLTVDKSRWQQGNVFSCSVMHEALHNHYTQKSLSLSPGK

SEQ ID NO: 3547 - protein, 4 aa, Artificial Sequence
  Description of Artificial Sequence: Synthetic peptide
EPEA

SEQ ID NO: 3548 - protein, 448 aa, Artificial Sequence
  Description of Artificial Sequence: Synthetic polypeptide
QVQLQQSGTELMKPGASVKISCKASGYTFSNYWIEWIKQRPGHGLEWVGEILPGAGPTNYNEKFKGKATFTADSSSNTAYMQLSSLTSEDSAVYYCARTDYDYDWFAYWGQGTLVTVSAAKTTAPSVYPLAPVSGDTTGSSVTLGCLVKGYFPEPVTLTWNSGSLSSGVHTFPAVLQSDLYTLSSSVTVTSSTWPSQSITCNVAHPASSTKVDKKIEPKSCDKTHTCPPCPAPNAAGGPSVFIFPPKIKDVLMISLSPIVTCVVVDVSEDDPDVQISWFVNNVEVHTAQTQTHREDYNSTLRVVSALPIQHQDWMSGKEFKCKVNNKDLGAPIERTISKPKGSVRAPQVCVLPPPEEEMTKKQVTLSCAVTDFMPEDIYVEWTNNGKTELNYKNTEPVLDSDGSYFMVSKLRVEKKNWVERNSYSCSVVHEGLHNHHTTKSFSRTPGK

SEQ ID NO: 3549 - protein, 370 aa, Artificial Sequence
  Description of Artificial Sequence: Synthetic polypeptide
APTSSSTKKTQLQLEHLLLDLQMILNGINNYKNPKLTRMLTFKFYMPKKATELKHLQCLEEELKPLEEVLNLAQSKNFHLRPRDLISNINVIVLELKGSETTFMCEYADETATIVEFLNRWITFCQSIISTLTGGGGSGGGGSDKTHTCPPCPAPNAAGGPSVFIFPPKIKDVLMISLSPIVTCVVVDVSEDDPDVQISWFVNNVEVHTAQTQTHREDYNSTLRVVSALPIQHQDWMSGKEFKCKVNNKDLGAPIERTISKPKGSVRAPQVYVLPPCEEEMTKKQVTLWCMVTDFMPEDIYVEWTNNGKTELNYKNTEPVLDSDGSYFMYSKLRVEKKNWVERNSYSCSVVHEGLHNHHTTKSFSRTPGK

SEQ ID NO: 3550 - protein, 26 aa, Artificial Sequence
  Description of Artificial Sequence: Synthetic peptide
TTEDFPLRLLSAAPSQTSVYFCASSY

SEQ ID NO: 3551 - protein, 29 aa, Artificial Sequence
  Description of Artificial Sequence: Synthetic peptide
NAGVTQTPKFRILKIGQSMTLQCTQDMNH

SEQ ID NO: 3552 - protein, 22 aa, Artificial Sequence
  Description of Artificial Sequence: Synthetic peptide
NYMYWYRQDPGMGLKLIYYSVG

SEQ ID NO: 3553 - protein, 10 aa, Artificial Sequence
  Description of Artificial Sequence: Synthetic peptide
AGITDKGEVP

SEQ ID NO: 3554 - protein, 8 aa, Artificial Sequence
  Description of Artificial Sequence: Synthetic peptide
NGYNVSRS

SEQ ID NO: 3555 - protein, 26 aa, Artificial Sequence
  Description of Artificial Sequence: Synthetic peptide
TTEDFPLRLELAAPSQTSVYFCASSY

SEQ ID NO: 3556 - protein, 29 aa, Artificial Sequence
  Description of Artificial Sequence: Synthetic peptide
NAGVTQTPKFHVLKTGQSMTLLCAQDMNH

SEQ ID NO: 3557 - protein, 22 aa, Artificial Sequence
  Description of Artificial Sequence: Synthetic peptide
EYMYRYRQDPGKGLRLIYYSVA

SEQ ID NO: 3558 - protein, 10 aa, Artificial Sequence
  Description of Artificial Sequence: Synthetic peptide
AALTDKGEVP

SEQ ID NO: 3559 - protein, 8 aa, Artificial Sequence
  Description of Artificial Sequence: Synthetic peptide
NGYNVSRS

SEQ ID NO: 3560 - protein, 26 aa, Artificial Sequence
  Description of Artificial Sequence: Synthetic peptide
NTEDFPLKLESAAPSQTSVYFCASSY

SEQ ID NO: 3561 - protein, 29 aa, Artificial Sequence
  Description of Artificial Sequence: Synthetic peptide
NAGVTQTPKFHILKTGQSMTLQCAQDMNH

SEQ ID NO: 3562 - protein, 22 aa, Artificial Sequence
  Description of Artificial Sequence: Synthetic peptide
GYMSWYRQDPGMGLRLIYYSAA

SEQ ID NO: 3563 - protein, 6 aa, Artificial Sequence
  Description of Artificial Sequence: Synthetic peptide
AGTTDK

SEQ ID NO: 3564 - protein, 8 aa, Artificial Sequence
  Description of Artificial Sequence: Synthetic peptide
NGYNVSRL

SEQ ID NO: 3565 - protein, 26 aa, Artificial Sequence
  Description of Artificial Sequence: Synthetic peptide
NTEDFPLRLVSAAPSQTSVYLCASSY

SEQ ID NO: 3566 - protein, 29 aa, Artificial Sequence
  Description of Artificial Sequence: Synthetic peptide
NAGVTQTPKFHILKTGQSMTLQCAQDMNH

SEQ ID NO: 3567 - protein, 22 aa, Artificial Sequence
  Description of Artificial Sequence: Synthetic peptide
GYLSWYRQDPGMGLRRIHYSVA

SEQ ID NO: 3568 - protein, 10 aa, Artificial Sequence
  Description of Artificial Sequence: Synthetic peptide
AGITDKGEVP

SEQ ID NO: 3569 - protein, 8 aa, Artificial Sequence
  Description of Artificial Sequence: Synthetic peptide
DGYNVSRS

SEQ ID NO: 3570 - protein, 26 aa, Artificial Sequence
  Description of Artificial Sequence: Synthetic peptide
NTEDFPLRLESAAPSQTSVYFCASSY

SEQ ID NO: 3571 - protein, 29 aa, Artificial Sequence
  Description of Artificial Sequence: Synthetic peptide
GAGVSQSLRHKVAKKGKDVALRYDPISGH

SEQ ID NO: 3572 - protein, 22 aa, Artificial Sequence
  Description of Artificial Sequence: Synthetic peptide
NALYWYRQSLGQGLEFPIYFQG

SEQ ID NO: 3573 - protein, 19 aa, Artificial Sequence
  Description of Artificial Sequence: Synthetic peptide
KDAADKSGLPRDRFSAQRS

SEQ ID NO: 3574 - protein, 26 aa, Artificial Sequence
  Description of Artificial Sequence: Synthetic peptide
EGSISTLKFQRTQQGDLAVYLCASSS

SEQ ID NO: 3575 - protein, 29 aa, Artificial Sequence
  Description of Artificial Sequence: Synthetic peptide
GAGVSQSPSNKVTEKGKDVELRCDPISGH

SEQ ID NO: 3576 - protein, 22 aa, Artificial Sequence
  Description of Artificial Sequence: Synthetic peptide
TALYWYRQSLGQGLEFLIYFQG

SEQ ID NO: 3577 - protein, 19 aa, Artificial Sequence
  Description of Artificial Sequence: Synthetic peptide
NSAPDKSGLPSDRFSAERT

SEQ ID NO: 3578 - protein, 26 aa, Artificial Sequence
  Description of Artificial Sequence: Synthetic peptide
GGSVSTLTIQRTQQEDSAVYLCASSL

SEQ ID NO: 3579 - protein, 29 aa, Artificial Sequence
  Description of Artificial Sequence: Synthetic peptide
GAGVSQTPSNKVTEKGKYVELRCDPISGH

SEQ ID NO: 3580 - protein, 22 aa, Artificial Sequence
  Description of Artificial Sequence: Synthetic peptide
TALYWYRQSLGQGPEFLIYFQG

SEQ ID NO: 3581 - protein, 19 aa, Artificial Sequence
  Description of Artificial Sequence: Synthetic peptide
TGAADDSGLPNDRFFAVRP

SEQ ID NO: 3582 - protein, 26 aa, Artificial Sequence
  Description of Artificial Sequence: Synthetic peptide
EGSVSTLKIQRTERGDSAVYLCASSL

SEQ ID NO: 3583 - protein, 29 aa, Artificial Sequence
  Description of Artificial Sequence: Synthetic peptide
GAGVSQSPRYKVAKRGRDVALRCDSISGH

SEQ ID NO: 3584 - protein, 22 aa, Artificial Sequence
  Description of Artificial Sequence: Synthetic peptide
VTLYWYRQTLGQGSEVLTYSQS

SEQ ID NO: 3585 - protein, 19 aa, Artificial Sequence
  Description of Artificial Sequence: Synthetic peptide
DAQRDKSGRPSGRFSAERP

SEQ ID NO: 3586 - protein, 26 aa, Artificial Sequence
  Description of Artificial Sequence: Synthetic peptide
ERSVSTLKIQRTEQGDSAVYLCASSL

SEQ ID NO: 3587 - protein, 29 aa, Artificial Sequence
  Description of Artificial Sequence: Synthetic peptide
GAGVSQSPRYKVTKRGQDVALRCDPISGH

SEQ ID NO: 3588 - protein, 22 aa, Artificial Sequence
  Description of Artificial Sequence: Synthetic peptide
VSLYWYRQALGQGPEFLTYFNY

SEQ ID NO: 3589 - protein, 19 aa, Artificial Sequence
  Description of Artificial Sequence: Synthetic peptide
EAQQDKSGLPNDRFSAERP

SEQ ID NO: 3590 - protein, 26 aa, Artificial Sequence
  Description of Artificial Sequence: Synthetic peptide
EGSISTLTIQRTEQRDSAMYRCASSL

SEQ ID NO: 3591 - protein, 29 aa, Artificial Sequence
  Description of Artificial Sequence: Synthetic peptide
GAGVSQSPRYKVTKRGQDVTLRCDPISSH

SEQ ID NO: 3592 - protein, 22 aa, Artificial Sequence
  Description of Artificial Sequence: Synthetic peptide
ATLYWYQQALGQGPEFLTYFNY

SEQ ID NO: 3593 - protein, 19 aa, Artificial Sequence
  Description of Artificial Sequence: Synthetic peptide
EAQPDKSGLPSDRFSAERP

SEQ ID NO: 3594 - protein, 26 aa, Artificial Sequence
  Description of Artificial Sequence: Synthetic peptide
EGSISTLTIQRTEQRDSAMYRCASSL

SEQ ID NO: 3595 - protein, 29 aa, Artificial Sequence
  Description of Artificial Sequence: Synthetic peptide
GAGVSQSPRYKVAKRGQDVALRCDPISGH

SEQ ID NO: 3596 - protein, 22 aa, Artificial Sequence
  Description of Artificial Sequence: Synthetic peptide
VSLFWYQQALGQGPEFLTYFQN

SEQ ID NO: 3597 - protein, 19 aa, Artificial Sequence
  Description of Artificial Sequence: Synthetic peptide
EAQLDKSGLPSDRFFAERP

SEQ ID NO: 3598 - protein, 26 aa, Artificial Sequence
  Description of Artificial Sequence: Synthetic peptide
EGSVSTLKIQRTQQEDSAVYLCASSL

SEQ ID NO: 3599 - protein, 29 aa, Artificial Sequence
  Description of Artificial Sequence: Synthetic peptide
DTGVSQNPRHKITKRGQNVTFRCDPISEH

SEQ ID NO: 3600 - protein, 22 aa, Artificial Sequence
  Description of Artificial Sequence: Synthetic peptide
NRLYWYRQTLGQGPEFLTYFQN

SEQ ID NO: 3601 - protein, 19 aa, Artificial Sequence
  Description of Artificial Sequence: Synthetic peptide
EAQLEKSRLLSDRFSAERP

SEQ ID NO: 3602 - protein, 26 aa, Artificial Sequence
  Description of Artificial Sequence: Synthetic peptide
KGSFSTLEIQRTEQGDSAMYLCASSL

SEQ ID NO: 3603 - protein, 29 aa, Artificial Sequence
  Description of Artificial Sequence: Synthetic peptide
DSGVTQTPKHLITATGQRVTLRCSPRSGD

SEQ ID NO: 3604 - protein, 22 aa, Artificial Sequence
  Description of Artificial Sequence: Synthetic peptide
LSVYWYQQSLDQGLQFLIQYYN

SEQ ID NO: 3605 - protein, 10 aa, Artificial Sequence
  Description of Artificial Sequence: Synthetic peptide
GEERAKGNIL

SEQ ID NO: 3606 - protein, 8 aa, Artificial Sequence
  Description of Artificial Sequence: Synthetic peptide
ERFSAQQF

SEQ ID NO: 3607 - protein, 26 aa, Artificial Sequence
  Description of Artificial Sequence: Synthetic peptide
PDLHSELNLSSLELGDSALYFCASSV

SEQ ID NO: 3608 - protein, 29 aa, Artificial Sequence
  Description of Artificial Sequence: Synthetic peptide
DAEITQSPRHKITETGRQVTLACHQTWNH

SEQ ID NO: 3609 - protein, 22 aa, Artificial Sequence
  Description of Artificial Sequence: Synthetic peptide
NNMFWYRQDLGHGLRLIHYSYG

SEQ ID NO: 3610 - protein, 10 aa, Artificial Sequence
  Description of Artificial Sequence: Synthetic peptide
VQDTNKGEVS

SEQ ID NO: 3611 - protein, 8 aa, Artificial Sequence
  Description of Artificial Sequence: Synthetic peptide
DGYSVSRS

SEQ ID NO: 3612 - protein, 26 aa, Artificial Sequence
  Description of Artificial Sequence: Synthetic peptide
NTEDLPLTLESAASSQTSVYFCASSE

SEQ ID NO: 3613 - protein, 29 aa, Artificial Sequence
  Description of Artificial Sequence: Synthetic peptide
DAGITQSPRYKITETGRQVTLMCHQTWSH

SEQ ID NO: 3614 - protein, 22 aa, Artificial Sequence
  Description of Artificial Sequence: Synthetic peptide
SYMFWYRQDLGHGLRLIYYSAA

SEQ ID NO: 3615 - protein, 10 aa, Artificial Sequence
  Description of Artificial Sequence: Synthetic peptide
ADITDKGEVP

SEQ ID NO: 3616 - protein, 8 aa, Artificial Sequence
  Description of Artificial Sequence: Synthetic peptide
DGYVVSRS

SEQ ID NO: 3617 - protein, 26 aa, Artificial Sequence
  Description of Artificial Sequence: Synthetic peptide
KTENFPLTLESATRSQTSVYFCASSE

SEQ ID NO: 3618 - protein, 29 aa, Artificial Sequence
  Description of Artificial Sequence: Synthetic peptide
DAGITQSPRHKVTETGTPVTLRCHQTENH

SEQ ID NO: 3619 - protein, 22 aa, Artificial Sequence
  Description of Artificial Sequence: Synthetic peptide
RYMYWYRQDPGHGLRLIHYSYG

SEQ ID NO: 3620 - protein, 10 aa, Artificial Sequence
  Description of Artificial Sequence: Synthetic peptide
VKDTDKGEVS

SEQ ID NO: 3621 - protein, 8 aa, Artificial Sequence
  Description of Artificial Sequence: Synthetic peptide
DGYSVSRS

SEQ ID NO: 3622 - protein, 26 aa, Artificial Sequence
  Description of Artificial Sequence: Synthetic peptide
KTEDFLLTLESATSSQTSVYFCAISE

SEQ ID NO: 3623 - protein, 29 aa, Artificial Sequence
  Description of Artificial Sequence: Synthetic peptide
EAEVAQSPRYKITEKSQAVAFWCDPISGH

SEQ ID NO: 3624 - protein, 22 aa, Artificial Sequence
  Description of Artificial Sequence: Synthetic peptide
ATLYWYRQILGQGPELLVQFQD

SEQ ID NO: 3625 - protein, 19 aa, Artificial Sequence
  Description of Artificial Sequence: Synthetic peptide
ESVVDDSQLPKDRFSAERL

SEQ ID NO: 3626 - protein, 26 aa, Artificial Sequence
  Description of Artificial Sequence: Synthetic peptide
KGVDSTLKIQPAELGDSAMYLCASSL

SEQ ID NO: 3627 - protein, 29 aa, Artificial Sequence
  Description of Artificial Sequence: Synthetic peptide
EAGVAQSPRYKIIEKRQSVAFWCNPISGH

SEQ ID NO: 3628 - protein, 22 aa, Artificial Sequence
  Description of Artificial Sequence: Synthetic peptide
ATLYWYQQILGQGPKLLIQFQN

SEQ ID NO: 3629 - protein, 19 aa, Artificial Sequence
  Description of Artificial Sequence: Synthetic peptide
NGVVDDSQLPKDRFSAERL

SEQ ID NO: 3630 - protein, 26 aa, Artificial Sequence
  Description of Artificial Sequence: Synthetic peptide
KGVDSTLKIQPAKLEDSAVYLCASSL

SEQ ID NO: 3631 - protein, 29 aa, Artificial Sequence
  Description of Artificial Sequence: Synthetic peptide
EAGVVQSPRYKIIEKKQPVAFWCNPISGH

SEQ ID NO: 3632 - protein, 22 aa, Artificial Sequence
  Description of Artificial Sequence: Synthetic peptide
NTLYWYLQNLGQGPELLIRYEN

SEQ ID NO: 3633 - protein, 19 aa, Artificial Sequence
  Description of Artificial Sequence: Synthetic peptide
EEAVDDSQLPKDRFSAERL

SEQ ID NO: 3634 - protein, 26 aa, Artificial Sequence
  Description of Artificial Sequence: Synthetic peptide
KGVDSTLKIQPAELGDSAVYLCASSL

SEQ ID NO: 3635 - protein, 29 aa, Artificial Sequence
  Description of Artificial Sequence: Synthetic peptide
DAGVIQSPRHKVTEMGQSVTLRCEPISGH

SEQ ID NO: 3636 - protein, 22 aa, Artificial Sequence
  Description of Artificial Sequence: Synthetic peptide
NDLLWYRQTFVQGLELLNYFCS

SEQ ID NO: 3637 - protein, 19 aa, Artificial Sequence
  Description of Artificial Sequence: Synthetic peptide
  MOD_RES (13)..(13): Any amino acid or absent
WTLVDDSGVSKDXFSAQMP

SEQ ID NO: 3638 - protein, 26 aa, Artificial Sequence
  Description of Artificial Sequence: Synthetic peptide
DVSFSTLRIQPMEPRDLGLYFCASSF

SEQ ID NO: 3639 - protein, 29 aa, Artificial Sequence
  Description of Artificial Sequence: Synthetic peptide
DAGIIQSPKHEVTEMGQTVTLRCEPIFGH

SEQ ID NO: 3640 - protein, 10 aa, Artificial Sequence
  Description of Artificial Sequence: Synthetic peptide
GFNIKSAYMH

SEQ ID NO: 3641 - protein, 11 aa, Artificial Sequence
  Description of Artificial Sequence: Synthetic peptide
SESVDSYGNSF

SEQ ID NO: 3642 - protein, 243 aa, Artificial Sequence
  Description of Artificial Sequence: Synthetic polypeptide
EVQLVESGGGLVQPGGSLRLSCAASGFTFSNFGMHWVRQAPGKGLEWVSYISSGSSTIYYADTLKGRFTISRDNSKNTLYLQMNSLRAEDTAVYYCARRGEGAMDYWGQGTTVTVSSGGGGSGGGGSGGGGSGGGGSDNQLTQSPSFLSASVGDRVTITCRASSSVNYIYWYQQKPGKAPKLLIYYTSNLAPGVPSRFSGSGSGNEYTLTISSLQPEDFATYYCQQFTSSPFTFGQGTKLEIK

SEQ ID NO: 3643 - protein, 16 aa, Artificial Sequence
  Description of Artificial Sequence: Synthetic peptide
GGGGSGGGGSGGGGGS

SEQ ID NO: 3644 - protein, 107 aa, Artificial Sequence [sequence omitted]

SEQ ID NO: 3645 - protein, 330 aa, Artificial Sequence
  Description of Artificial Sequence: Synthetic polypeptide
ASTKGPSVFPLAPSSKSTSGGTAALGCLVKDYFPEPVTVSWNSGALTSGVHTFPAVLQSSGLYSLSSVVTVPSSSLGTQTYICNVNHKPSNTKVDKKVEPKSCDKTHTCPPCPAPELLGGPSVFLFPPKPKDTLMISRTPEVTCVVVDVSHEDPEVKFNWYVDGVEVHNAKTKPREEQYASTYRVVSVLTVLHQDWLNGKEYKCKVSNKALPAPIEKTISKAKGQPREPQVYTLPPSREEMTKNQVSLTCLVKGFYPSDIAVEWESNGQPENNYKTTPPVLDSDGSFFLYSKLTVDKSRWQQGNVFSCSVMHEALHNHYTQKSLSLSPGK

SEQ ID NO: 3646 - protein, 334 aa, Artificial Sequence
  Description of Artificial Sequence: Synthetic polypeptide
ASTKGPSVFPLAPSSKSTSGGTAALGCLVKDYFPEPVTVSWNSGALTSGVHTFPAVLQSSGLYSLSSVVTVPSSSLGTQTYICNVNHKPSNTKVDKKVEPKSCDKTHTCPPCPAPELLGGPSVFLFPPKPKDTLMISRTPEVTCVVVDVSHEDPEVKFNWYVDGVEVHNAKTKPREEQYASTYRVVSVLTVLHQDWLNGKEYKCKVSNKALPAPIEKTISKAKGQPREPQVYTLPPSREEMTKNQVSLTCLVKGFYPSDIAVEWESNGQPENNYKTTPPVLDSDGSFFLYSKLTVDKSRWQQGNVFSCSVMHEALHNHYTQKSLSLSPGKEPEA

SEQ ID NO: 3647 - protein, 330 aa, Artificial Sequence; identical to SEQ ID NO: 41
  Description of Artificial Sequence: Synthetic polypeptide

SEQ ID NO: 3648 - protein, 227 aa, Artificial Sequence
  Description of Artificial Sequence: Synthetic polypeptide
DKTHTCPPCPAPELLGGPSVFLFPPKPKDTLMISRTPEVTCVVVDVSHEDPEVKFNWYVDGVEVHNAKTKPREEQYASTYRVVSVLTVLHQDWLNGKEYKCKVSNKALPAPIEKTISKAKGQPREPQVYTLPPCREEMTKNQVSLWCLVKGFYPSDIAVEWESNGQPENNYKTTPPVLDSDGSFFLYSKLTVDKSRWQQGNVFSCSVMHEALHNHYTQKSLSLSPGK

SEQ ID NO: 3649 - protein, 330 aa, Artificial Sequence
  Description of Artificial Sequence: Synthetic polypeptide
ASTKGPSVFPLAPSSKSTSGGTAALGCLVKDYFPEPVTVSWNSGALTSGVHTFPAVLQSSGLYSLSSVVTVPSSSLGTQTYICNVNHKPSNTKVDKRVEPKSCDKTHTCPPCPAPELLGGPSVFLFPPKPKDTLMISRTPEVTCVVVDVSHEDPEVKFNWYVDGVEVHNAKTKPREEQYASTYRVVSVLTVLHQDWLNGKEYKCKVSNKALPAPIEKTISKAKGQPREPQVCTLPPSREEMTKNQVSLSCAVKGFYPSDIAVEWESNGQPENNYKTTPPVLDSDGSFFLVSKLTVDKSRWQQGNVFSCSVMHEALHNHYTQKSLSLSPGK

SEQ ID NO: 3650 - protein, 10 aa, Artificial Sequence
  Description of Artificial Sequence: Synthetic peptide
GHDFRLTYIH

SEQ ID NO: 3651 - protein, 17 aa, Artificial Sequence
  Description of Artificial Sequence: Synthetic peptide
RVSAGSGNVKYNEKFKG

SEQ ID NO: 3652 - protein, 11 aa, Artificial Sequence
  Description of Artificial Sequence: Synthetic peptide
KASQNVGNRVV

SEQ ID NO: 3653 - protein, 7 aa, Artificial Sequence
  Description of Artificial Sequence: Synthetic peptide
SSSHRYK

SEQ ID NO: 3654 - protein, 17 aa, Artificial Sequence
  Description of Artificial Sequence: Synthetic peptide
RIYAGSGNVKYNEKFKG

SEQ ID NO: 3655 - protein, 11 aa, Artificial Sequence
  Description of Artificial Sequence: Synthetic peptide
KASQNVADRVV

SEQ ID NO: 3656 - protein, 10 aa, Artificial Sequence
  Description of Artificial Sequence: Synthetic peptide
GHDFKLTYIH

SEQ ID NO: 3657 - protein, 17 aa, Artificial Sequence
  Description of Artificial Sequence: Synthetic peptide
RVSAGSGNTKYNEKFKG

SEQ ID NO: 3658 - protein, 11 aa, Artificial Sequence
  Description of Artificial Sequence: Synthetic peptide
KASQNVGDRVA

SEQ ID NO: 3659 - protein, 17 aa, Artificial Sequence
  Description of Artificial Sequence: Synthetic peptide
RVYAGSGNTKYNEKFKG

SEQ ID NO: 3660 - protein, 11 aa, Artificial Sequence
  Description of Artificial Sequence: Synthetic peptide
KASQNVEDRVV

SEQ ID NO: 3661 - protein, 17 aa, Artificial Sequence
  Description of Artificial Sequence: Synthetic peptide
RISAGSGNTKYNEKFKG

SEQ ID NO: 3662 - protein, 11 aa, Artificial Sequence
  Description of Artificial Sequence: Synthetic peptide
KASQNVGDRVV

SEQ ID NO: 3663 - protein, 17 aa, Artificial Sequence
  Description of Artificial Sequence: Synthetic peptide
RIYAGSGNTKYNEKFKG

SEQ ID NO: 3664 - protein, 9 aa, Artificial Sequence
  Description of Artificial Sequence: Synthetic peptide
LQHNSYPLT

SEQ ID NO: 3665 - protein, 17 aa, Artificial Sequence
  Description of Artificial Sequence: Synthetic peptide
RVSAGSGNVNYAQKFQG

SEQ ID NO: 3666 - protein, 11 aa, Artificial Sequence
  Description of Artificial Sequence: Synthetic peptide
RASQNVDNRLG

SEQ ID NO: 3667 - protein, 11 aa, Artificial Sequence
  Description of Artificial Sequence: Synthetic peptide
KASQNVDNRVA

SEQ ID NO: 3668 - protein, 7 aa, Artificial Sequence
  Description of Artificial Sequence: Synthetic peptide
AASSLQK

SEQ ID NO: 3669 - protein, 22 aa, Artificial Sequence
  Description of Artificial Sequence: Synthetic peptide
TSVSSYQQALGQGPQFIFQYYE

SEQ ID NO: 3670 - protein, 10 aa, Artificial Sequence
  Description of Artificial Sequence: Synthetic peptide
KEERGRGNFP

SEQ ID NO: 3671 - protein, 8 aa, Artificial Sequence
  Description of Artificial Sequence: Synthetic peptide
DQFSGHQF

SEQ ID NO: 3672 - protein, 26 aa, Artificial Sequence
  Description of Artificial Sequence: Synthetic peptide
PNYSSELNVNALLLGDSALYLCASSL

SEQ ID NO: 3673 - protein, 29 aa, Artificial Sequence
  Description of Artificial Sequence: Synthetic peptide
EAGVTQSPTHLIKTRGQQATLRCSPISGH

SEQ ID NO: 3674 - protein, 10 aa, Artificial Sequence
  Description of Artificial Sequence: Synthetic peptide
GEERNRGNFP

SEQ ID NO: 3675 - protein, 8 aa, Artificial Sequence
  Description of Artificial Sequence: Synthetic peptide
PRFSGRQF

SEQ ID NO: 3676 - protein, 29 aa, Artificial Sequence
  Description of Artificial Sequence: Synthetic peptide
NAGVTQTPKFQVLKTGQSMTLQCAQDMNH

SEQ ID NO: 3677 - protein, 22 aa, Artificial Sequence
  Description of Artificial Sequence: Synthetic peptide
NSMYWYRQDPGMGLRLIYYSAS

SEQ ID NO: 3678 - protein, 10 aa, Artificial Sequence
  Description of Artificial Sequence: Synthetic peptide
EGTTDKGEVP

SEQ ID NO: 3679 - protein, 8 aa, Artificial Sequence
  Description of Artificial Sequence: Synthetic peptide
NGYNVSRL

SEQ ID NO: 3680 - protein, 26 aa, Artificial Sequence
  Description of Artificial Sequence: Synthetic peptide
NKREFSLRLESAAPSQTSVYFCASSE

SEQ ID NO: 3681 - protein, 29 aa, Artificial Sequence
  Description of Artificial Sequence: Synthetic peptide
NAGVTQTPKFRVLKTGQSMTLLCAQDMNH

SEQ ID NO: 3682 - protein, 22 aa, Artificial Sequence
  Description of Artificial Sequence: Synthetic peptide
EYMYWYRQDPGMGLRLIHYSVG

SEQ ID NO: 3683 - protein, 10 aa, Artificial Sequence
  Description of Artificial Sequence: Synthetic peptide
EGTTAKGEVP

SEQ ID NO: 3684 - protein, 8 aa, Artificial Sequence
  Description of Artificial Sequence: Synthetic peptide
DGYNVSRL

SEQ ID NO: 3685 - protein, 26 aa, Artificial Sequence
  Description of Artificial Sequence: Synthetic peptide
KKQNFLLGLESAAPSQTSVYFCASSY

SEQ ID NO: 3686 - protein, 29 aa, Artificial Sequence
  Description of Artificial Sequence: Synthetic peptide
NAGVTQTPKFRVLKTGQSMTLLCAQDMNH

SEQ ID NO: 3687 - protein, 22 aa, Artificial Sequence
  Description of Artificial Sequence: Synthetic peptide
EYMYWYRQDPGMGLRLIHYSVG

SEQ ID NO: 3688 - protein, 8 aa, Artificial Sequence
  Description of Artificial Sequence: Synthetic peptide
DGYNVSRL

SEQ ID NO: 3689 - protein, 26 aa, Artificial Sequence
  Description of Artificial Sequence: Synthetic peptide
KKQNFLLGLESAAPSQTSVYFCASSY

SEQ ID NO: 3690 - protein, 29 aa, Artificial Sequence
  Description of Artificial Sequence: Synthetic peptide
IAGITQAPTSQILAAGRRMTLRCTQDMRH

SEQ ID NO: 3691 - protein, 22 aa, Artificial Sequence
  Description of Artificial Sequence: Synthetic peptide
NAMYWYRQDLGLGLRLIHYSNT

SEQ ID NO: 3692 - protein, 10 aa, Artificial Sequence
  Description of Artificial Sequence: Synthetic peptide
AGTTGKGEVP

SEQ ID NO: 3693 - protein, 8 aa, Artificial Sequence
  Description of Artificial Sequence: Synthetic peptide
DGYSVSRA

SEQ ID NO: 3694 - protein, 26 aa, Artificial Sequence
  Description of Artificial Sequence: Synthetic peptide
NTDDFPLTLASAVPSQTSVYFCASSD

SEQ ID NO: 3695 - protein, 29 aa, Artificial Sequence
  Description of Artificial Sequence: Synthetic peptide
NAGVTQTPKFQVLKTGQSMTLQCAQDMNH

SEQ ID NO: 3696 - protein, 22 aa, Artificial Sequence
  Description of Artificial Sequence: Synthetic peptide
EYMSWYRQDPGMGLRLIHYSVG

SEQ ID NO: 3697 - protein, 10 aa, Artificial Sequence
  Description of Artificial Sequence: Synthetic peptide
AGITDQGEVP

SEQ ID NO: 3698 - protein, 8 aa, Artificial Sequence
  Description of Artificial Sequence: Synthetic peptide
NGYNVSRS

SEQ ID NO: 3699 - protein, 22 aa, Artificial Sequence
  Description of Artificial Sequence: Synthetic peptide
NFLFWYRDTFVQGLELLSYFRS

SEQ ID NO: 3700 - protein, 19 aa, Artificial Sequence
  Description of Artificial Sequence: Synthetic peptide
  MOD_RES (1)..(1): Any amino acid or absent
XSIIDNAGMPTERFSAERP

SEQ ID NO: 3701 - protein, 26 aa, Artificial Sequence
  Description of Artificial Sequence: Synthetic peptide
DGSFSTLKIQPAEQGDSAVYVCASRL

SEQ ID NO: 3702 - protein, 29 aa, Artificial Sequence
  Description of Artificial Sequence: Synthetic peptide
DAGVIQSPRHEVTEMGQEVTLRCKPISGH

SEQ ID NO: 3703 - protein, 22 aa, Artificial Sequence
  Description of Artificial Sequence: Synthetic peptide
NSLFWYRQTMMRGLELLIYFNN

SEQ ID NO: 3704 - protein, 19 aa, Artificial Sequence
  Description of Artificial Sequence: Synthetic peptide
NVPIDDSGMPEDRFSAKMP

SEQ ID NO: 3705 - protein, 26 aa, Artificial Sequence
  Description of Artificial Sequence: Synthetic peptide
NASFSTLKIQPSEPRDSAVYFCASSL

SEQ ID NO: 3706 - protein, 29 aa, Artificial Sequence
  Description of Artificial Sequence: Synthetic peptide
DAGVIQSPRHEVTEMGQEVTLRCKPISGH

SEQ ID NO: 3707 - protein, 22 aa, Artificial Sequence
  Description of Artificial Sequence: Synthetic peptide
DYLFWYRQTMMRGLELLIYFNN

SEQ ID NO: 3708 - protein, 19 aa, Artificial Sequence
  Description of Artificial Sequence: Synthetic peptide
NVPIDDSGMPEDRFSAKMP

SEQ ID NO: 3709 - protein, 26 aa, Artificial Sequence
  Description of Artificial Sequence: Synthetic peptide
NASFSTLKIQPSEPRDSAVYFCASSL

SEQ ID NO: 3710 - protein, 29 aa, Artificial Sequence
  Description of Artificial Sequence: Synthetic peptide
DARVTQTPRHKVTEMGQEVTMRCQPILGH

SEQ ID NO: 3711 - protein, 22 aa, Artificial Sequence
  Description of Artificial Sequence: Synthetic peptide
NTVFWYRQTMMQGLELLAYFRN

SEQ ID NO: 3712 - protein, 19 aa, Artificial Sequence
  Description of Artificial Sequence: Synthetic peptide
RAPLDDSGMPKDRFSAEMP

SEQ ID NO: 3713 - protein, 26 aa, Artificial Sequence
  Description of Artificial Sequence: Synthetic peptide
DATLATLKIQPSEPRDSAVYFCASGL

SEQ ID NO: 3714 - protein, 29 aa, Artificial Sequence
  Description of Artificial Sequence: Synthetic peptide
AAGVIQSPRHLIKEKRETATLKCYPIPRH

SEQ ID NO: 3715 - protein, 22 aa, Artificial Sequence
  Description of Artificial Sequence: Synthetic peptide
DTVYWYQQGPGQDPQFLISFYE

SEQ ID NO: 3716 - protein, 10 aa, Artificial Sequence
  Description of Artificial Sequence: Synthetic peptide
KMQSDKGSIP

SEQ ID NO: 3717 - protein, 8 aa, Artificial Sequence
  Description of Artificial Sequence: Synthetic peptide
DRFSAQQF

SEQ ID NO: 3718 - protein, 26 aa, Artificial Sequence
  Description of Artificial Sequence: Synthetic peptide
SDYHSELNMSSLELGDSALYFCASSL

SEQ ID NO: 3719 - protein, 29 aa, Artificial Sequence
  Description of Artificial Sequence: Synthetic peptide
EAGVTQFPSHSVIEKGQTVTLRCDPISGH

SEQ ID NO: 3720 - protein, 22 aa, Artificial Sequence
  Description of Artificial Sequence: Synthetic peptide
DNLYWYRRVMGKEIKFLLHFVK

SEQ ID NO: 3721 - protein, 19 aa, Artificial Sequence
  Description of Artificial Sequence: Synthetic peptide
ESKQDESGMPNNRFLAERT

SEQ ID NO: 3722 - protein, 26 aa, Artificial Sequence
  Description of Artificial Sequence: Synthetic peptide
GGTYSTLKVQPAELEDSGVYFCASSQ

SEQ ID NO: 3723 - protein, 29 aa, Artificial Sequence
  Description of Artificial Sequence: Synthetic peptide
DAMVIQNPRYQVTQFGKPVTLSCSQTLNH

SEQ ID NO: 3724 - protein, 22 aa, Artificial Sequence
  Description of Artificial Sequence: Synthetic peptide
NVMYWYQQKSSQAPKLLFHYYD

SEQ ID NO: 3725 - protein, 10 aa, Artificial Sequence
  Description of Artificial Sequence: Synthetic peptide
KDFNNEADTP

SEQ ID NO: 3726 - protein, 8 aa, Artificial Sequence
  Description of Artificial Sequence: Synthetic peptide
DNFQSRRP

SEQ ID NO: 3727 - protein, 26 aa, Artificial Sequence
  Description of Artificial Sequence: Synthetic peptide
NTSFCFLDIRSPGLGDTAMYLCATSR

SEQ ID NO: 3728 - protein, 29 aa, Artificial Sequence
  Description of Artificial Sequence: Synthetic peptide
GEEVAQTPKHLVRGEGQKAKLYCAPIKGH

SEQ ID NO: 3729 - protein, 22 aa, Artificial Sequence
  Description of Artificial Sequence: Synthetic peptide
SYVFWYQQVLKNEFKFLISFQN

SEQ ID NO: 3730 - protein, 19 aa, Artificial Sequence
  Description of Artificial Sequence: Synthetic peptide
ENVFDETGMPKERFSAKCL

SEQ ID NO: 3731 - protein, 26 aa, Artificial Sequence
  Description of Artificial Sequence: Synthetic peptide
PNSPCSLEIQATKLEDSAVYFCASSQ

SEQ ID NO: 3732 - protein, 29 aa, Artificial Sequence
  Description of Artificial Sequence: Synthetic peptide
EPGVSQTPRHKVTNMGQEVILRCDPSSGH

SEQ ID NO: 3733 - protein, 22 aa, Artificial Sequence
  Description of Artificial Sequence: Synthetic peptide
MFVHWYRQNLRQEMKLLISFQY

SEQ ID NO: 3734 - protein, 19 aa, Artificial Sequence
  Description of Artificial Sequence: Synthetic peptide
QNIAVDSGMPKERFTAERP

SEQ ID NO: 3735 - protein, 25 aa, Artificial Sequence
  Description of Artificial Sequence: Synthetic peptide
NGTSSTLKIHPAEPRDSAVYLYSSG

SEQ ID NO: 3736 - protein, 29 aa, Artificial Sequence
  Description of Artificial Sequence: Synthetic peptide
NAGVMQNPRHLVRRRGQEARLRCSPMKGH

SEQ ID NO: 3737 - protein, 22 aa, Artificial Sequence
  Description of Artificial Sequence: Synthetic peptide
SHVYWYRQLPEEGLKFMVYLQK

SEQ ID NO: 3738 - protein, 19 aa, Artificial Sequence
  Description of Artificial Sequence: Synthetic peptide
ENIIDESGMPKERFSAEFP

SEQ ID NO: 3739 - protein, 26 aa, Artificial Sequence
  Description of Artificial Sequence: Synthetic peptide
KEGPSILRIQQVVRGDSAAYFCASSP

SEQ ID NO: 3740 - protein, 29 aa, Artificial Sequence
  Description of Artificial Sequence: Synthetic peptide
DGGITQSPKYLFRKEGQNVTLSCEQNLNH

SEQ ID NO: 3741 - protein, 22 aa, Artificial Sequence
  Description of Artificial Sequence: Synthetic peptide
DAMYWYRQDPGQGLRLIYYSQI

SEQ ID NO: 3742 - protein, 10 aa, Artificial Sequence
  Description of Artificial Sequence: Synthetic peptide
VNDFQKGDIA

SEQ ID NO: 3743 - protein, 8 aa, Artificial Sequence
  Description of Artificial Sequence: Synthetic peptide
EGYSVSRE

SEQ ID NO: 3744 - protein, 26 aa, Artificial Sequence
  Description of Artificial Sequence: Synthetic peptide
KKESFPLTVTSAQKNPTAFYLCASSI

SEQ ID NO: 3745 - protein, 29 aa, Artificial Sequence
  Description of Artificial Sequence: Synthetic peptide
GAVVSQHPSWVICKSGTSVKIECRSLDFQ

SEQ ID NO: 3746 - protein, 24 aa, Artificial Sequence
  Description of Artificial Sequence: Synthetic peptide
ATTMFWYRQFPKQSLMLMATSNEG

SEQ ID NO: 3747 - protein, 19 aa, Artificial Sequence
  Description of Artificial Sequence: Synthetic peptide
SKATYEQGVEKDKFLINHA

SEQ ID NO: 3748 - protein, 25 aa, Artificial Sequence
  Description of Artificial Sequence: Synthetic peptide
SLTLSTLTVTSAHPEDSSFYICSAR

SEQ ID NO: 3749 - protein, 29 aa, Artificial Sequence
  Description of Artificial Sequence: Synthetic peptide
DTKVTQRPRLLVKASEQKAKMDCVPIKAH

SEQ ID NO: 3750 - protein, 22 aa, Artificial Sequence
  Description of Artificial Sequence: Synthetic peptide
SYVYWYRKKLEEELKFLVYFQN

SEQ ID NO: 3751 - protein, 19 aa, Artificial Sequence
  Description of Artificial Sequence: Synthetic peptide
EELIQKAEIINERFLAQCS

SEQ ID NO: 3752 - protein, 26 aa, Artificial Sequence
  Description of Artificial Sequence: Synthetic peptide
KNSSCTLEIQSTESGDTALYFCASSK

SEQ ID NO: 3753 - protein, 29 aa, Artificial Sequence
  Description of Artificial Sequence: Synthetic peptide
HAKVTQTPGHLVKGKGQKTKMDCTPEKGH

SEQ ID NO: 3754 - protein, 22 aa, Artificial Sequence
  Description of Artificial Sequence: Synthetic peptide
TFVYWYQQNQNKEFMLLISFQN

SEQ ID NO: 3755 - protein, 19 aa, Artificial Sequence
  Description of Artificial Sequence: Synthetic peptide
EQVLQETEMHKKRFSSQCP

SEQ ID NO: 3756 - protein, 26 aa, Artificial Sequence
  Description of Artificial Sequence: Synthetic peptide
KNAPCSLAILSSEPGDTALYLCASSQ

SEQ ID NO: 3757 - protein, 29 aa, Artificial Sequence
  Description of Artificial Sequence: Synthetic peptide
DADVTQTPRNRITKTGKRIMLECSQTKGH

SEQ ID NO: 3758 - protein, 22 aa, Artificial Sequence
  Description of Artificial Sequence: Synthetic peptide
DRMYWYRQDPGLGLRLIYYSFD

SEQ ID NO: 3759 - protein, 10 aa, Artificial Sequence
  Description of Artificial Sequence: Synthetic peptide
VKDINKGEIS

SEQ ID NO: 3760 - protein, 8 aa, Artificial Sequence
  Description of Artificial Sequence: Synthetic peptide
DGYSVSRQ

SEQ ID NO: 3761 - protein, 27 aa, Artificial Sequence
  Description of Artificial Sequence: Synthetic peptide
AQAKFSLSLESAIPNQTALYFCATSDL

SEQ ID NO: 3762 - protein, 29 aa, Artificial Sequence
  Description of Artificial Sequence: Synthetic peptide
EADIYQTPRYLVIGTGKKITLECSQTMGH

SEQ ID NO: 3763 - protein, 22 aa, Artificial Sequence
  Description of Artificial Sequence: Synthetic peptide
DKMYWYQQDPGMELHLIHYSYG

SEQ ID NO: 3764 - protein, 10 aa, Artificial Sequence
  Description of Artificial Sequence: Synthetic peptide
VNSTEKGDLS

SEQ ID NO: 3765 - protein, 8 aa, Artificial Sequence
  Description of Artificial Sequence: Synthetic peptide
SESTVSRI

SEQ ID NO: 3766 - protein, 26 aa, Artificial Sequence
  Description of Artificial Sequence: Synthetic peptide
RTEHFPLTLESARPSHTSQYLCASSE

SEQ ID NO: 3767 - protein, 29 aa, Artificial Sequence
  Description of Artificial Sequence: Synthetic peptide
DAVVTQFPRHRIIGTGKEFILQCSQNMNH

SEQ ID NO: 3768 - protein, 22 aa, Artificial Sequence
  Description of Artificial Sequence: Synthetic peptide
VTMYWYRQDPGLGLKLVYYSPG

SEQ ID NO: 3769 - protein, 10 aa, Artificial Sequence
  Description of Artificial Sequence: Synthetic peptide
TGSTEKGDIS

SEQ ID NO: 3770 - protein, 8 aa, Artificial Sequence
  Description of Artificial Sequence: Synthetic peptide
  MOD_RES (7)..(7): Any amino acid or absent
EGYHVSXN

SEQ ID NO: 3771 - protein, 26 aa, Artificial Sequence
  Description of Artificial Sequence: Synthetic peptide
TIASFPLTLKSASTNQTSVYLYASSS

SEQ ID NO: 3772 - protein, 29 aa, Artificial Sequence
  Description of Artificial Sequence: Synthetic peptide
EAQVTQNPRYLITVTGKKLTVTCSQNMNH

SEQ ID NO: 3773 - protein, 22 aa, Artificial Sequence
  Description of Artificial Sequence: Synthetic peptide
EYMSWYRQDPGLGLRQIYYSMN

SEQ ID NO: 3774 - protein, 10 aa, Artificial Sequence
  Description of Artificial Sequence: Synthetic peptide
VEVTDKGDVP

SEQ ID NO: 3775 - protein, 8 aa, Artificial Sequence
  Description of Artificial Sequence: Synthetic peptide
EGYKVSRK

SEQ ID NO: 3776 - protein, 26 aa, Artificial Sequence
  Description of Artificial Sequence: Synthetic peptide
EKRNFPLILESPSPNQTSLYFCASSL

SEQ ID NO: 3777 - protein, 29 aa, Artificial Sequence
  Description of Artificial Sequence: Synthetic peptide
DVKVTQSSRYLVKRTGEKVFLECVQDMDH

SEQ ID NO: 3778 - protein, 22 aa, Artificial Sequence
  Description of Artificial Sequence: Synthetic peptide
ENMFWYRQDPGLGLRLIYFSYD

SEQ ID NO: 3779 - protein, 10 aa, Artificial Sequence
  Description of Artificial Sequence: Synthetic peptide
VKMKEKGDIP

SEQ ID NO: 3780 - protein, 8 aa, Artificial Sequence
  Description of Artificial Sequence: Synthetic peptide
EGYSVSRE

SEQ ID NO: 3781 - protein, 26 aa, Artificial Sequence
  Description of Artificial Sequence: Synthetic peptide
KKERFSLILESASTNQTSMYLCASSL

SEQ ID NO: 3782 - protein, 29 aa, Artificial Sequence
  Description of Artificial Sequence: Synthetic peptide
SAVISQKPSRDICQRGTSLTIQCQVDSQV

SEQ ID NO: 3783 - protein, 23 aa, Artificial Sequence
  Description of Artificial Sequence: Synthetic peptide
TMMFWYRQQPGQSLTLIATANQG

SEQ ID NO: 3784 - protein, 19 aa, Artificial Sequence
  Description of Artificial Sequence: Synthetic peptide
SEATYESGFVIDKFPISRP

SEQ ID NO: 3785 - protein, 25 aa, Artificial Sequence
  Description of Artificial Sequence: Synthetic peptide
NLTFSTLTVSNMSPEDSSIYLCSVE

SEQ ID NO: 3786 - protein, 29 aa, Artificial Sequence
  Description of Artificial Sequence: Synthetic peptide
SQTIHQWPATLVQPVGSPLSLECTVEGTS

SEQ ID NO: 3787 - protein, 23 aa, Artificial Sequence
  Description of Artificial Sequence: Synthetic peptide
NPNLYWYRQAAGRGLQLLFYSVG

SEQ ID NO: 3788 - protein, 9 aa, Artificial Sequence
  Description of Artificial Sequence: Synthetic peptide
IGQISSEVP

SEQ ID NO: 3789 - protein, 8 aa, Artificial Sequence
  Description of Artificial Sequence: Synthetic peptide
QNLSASRP

SEQ ID NO: 3790 - protein, 25 aa, Artificial Sequence
  Description of Artificial Sequence: Synthetic peptide
QDRQFILSSKKLLLSDSGFYLCAWS

What is claimed is:

1.-193. (canceled)

194. A multispecific molecule comprising a first polypeptide and a second polypeptide,
wherein the first polypeptide and the second polypeptide are non-contiguous;
wherein:
(i) the first polypeptide comprises a first portion of a dimerization module linked to:
(A) a TCRβV-binding moiety comprising a heavy chain variable domain (VH) and a light chain variable domain (VL), or a single domain antibody, or
(B) a first portion of a TCRβV-binding moiety comprising a VH of the TCRβV-binding moiety, wherein the multispecific molecule further comprises a third polypeptide comprising a second portion of the TCRβV-binding moiety comprising a VL of the TCRβV-binding moiety, wherein the third polypeptide is non-contiguous with the first polypeptide and the second polypeptide; and
(ii) the second polypeptide comprises at least one cytokine or a functional fragment or variant thereof and a second portion of the dimerization module, wherein the at least one cytokine or a functional fragment or variant thereof is covalently linked to the second polypeptide; and
wherein the at least one cytokine or a functional fragment or variant thereof comprises a sequence having at least 90% sequence identity to the sequence of SEQ ID NO: 3523 operatively linked to a sequence having at least 90% sequence identity to the sequence of SEQ ID NO: 2170.

195. The multispecific molecule of claim 194, wherein the at least one cytokine or a functional fragment or variant thereof comprises the sequence of SEQ ID NO: 3523 operatively linked to the sequence of SEQ ID NO: 2170.

196. The multispecific molecule of claim 195, wherein the sequence of SEQ ID NO: 3523 is operatively linked to the sequence of SEQ ID NO: 2170 via the sequence of SEQ ID NO: 3524.

197. The multispecific molecule of claim 194, wherein the at least one cytokine or a functional fragment or variant thereof is within a single contiguous polypeptide chain of the second polypeptide.

198. The multispecific molecule of claim 194, wherein the TCRβV-binding moiety binds to one or more of a TCRβV subfamily selected from the group consisting of TCRβV1 subfamily, TCRβV2 subfamily, TCRβV3 subfamily, TCRβV4 subfamily, TCRβV5 subfamily, TCRβV6 subfamily, TCRβV7 subfamily, TCRβV9 subfamily, TCRβV10 subfamily, TCRβV11 subfamily, TCRβV12 subfamily, TCRβV13 subfamily, TCRβV16 subfamily, TCRβV19 subfamily, TCRβV20 subfamily, TCRβV21 subfamily, TCRβV23 subfamily, TCRβV24 subfamily, TCRβV25 subfamily, TCRβV26 subfamily, TCRβV27 subfamily, TCRβV28 subfamily, TCRβV29 subfamily, and TCRβV30 subfamily.

199. The multispecific molecule of claim 194, wherein the TCRβV-binding moiety comprises any one selected from the group consisting of a full antibody, a bivalent antibody, a Fab, a F(ab′)2, an Fv, a single chain Fv (scFv), a single domain antibody, a diabody, and a camelid antibody.

200. The multispecific molecule of claim 194, wherein the TCRβV-binding moiety comprises a Fab or an scFv.

201. The multispecific molecule of claim 194, wherein the first portion of the dimerization module comprises a first immunoglobulin constant region and the second portion of the dimerization module comprises a second immunoglobulin constant region;
wherein the first immunoglobulin constant region comprises a first Fc region, and the second immunoglobulin constant region comprises a second Fc region,
wherein the first Fc region, the second Fc region, or a combination thereof is selected from the group consisting of an IgG1 Fc region or a fragment thereof, an IgG2 Fc region or a fragment thereof, an IgG3 Fc region or a fragment thereof, an IgGA1 Fc region or a fragment thereof, an IgGA2 Fc region or a fragment thereof, an IgG4 Fc region or a fragment thereof, an IgJ Fc region or a fragment thereof, an IgM Fc region or a fragment thereof, an IgD Fc region or a fragment thereof, and an IgE Fc region or a fragment thereof.

202. The multispecific molecule of claim 201, wherein:
(i) the first Fc region, the second Fc region, or a combination thereof comprises an Fc interface with one or more of: a paired cavity-protuberance, an electrostatic interaction, or a strand-exchange,
wherein dimerization of the first Fc region and the second Fc region is enhanced as indicated by a greater ratio of heteromultimer:homomultimer forms relative to dimerization of Fc regions with a non-engineered interface; and/or
(ii) the first Fc region, the second Fc region, or a combination thereof comprises an Asn297Ala (N297A) mutation or a Leu234Ala/Leu235Ala (LALA) mutation according to EU Numbering.

203. The multispecific molecule of claim 201, wherein the first Fc region, the second Fc region, or a combination thereof comprises a sequence having at least 75% sequence identity to the sequence of SEQ ID NO: 40, SEQ ID NO: 41, SEQ ID NO: 42, SEQ ID NO: 3531, SEQ ID NO: 3533, SEQ ID NO: 3537, SEQ ID NO: 3645, SEQ ID NO: 3646, SEQ ID NO: 3647, SEQ ID NO: 3648, or SEQ ID NO: 3649.

204. The multispecific molecule of claim 194, wherein the first portion of the dimerization module comprises a sequence having at least 75% sequence identity to the sequence of SEQ ID NO: 3649 and the second portion of the dimerization module comprises a sequence having at least 75% sequence identity to the sequence of SEQ ID NO: 3648.

205. The multispecific molecule of claim 194, wherein the first portion of the dimerization module comprises the sequence of SEQ ID NO: 3649 and the second portion of the dimerization module comprises the sequence of SEQ ID NO: 3648.

206. The multispecific molecule of claim 194, wherein the multispecific molecule further comprises a light chain constant region operatively linked to the VL of the TCRβV-binding moiety; and
wherein the light chain constant region is selected from the group consisting of a kappa light chain constant region or a fragment thereof and a lambda light chain constant region or a fragment thereof.

207. The multispecific molecule of claim 206, wherein the light chain constant region comprises a sequence having at least 75% sequence identity to the sequence of SEQ ID NO: 3644 or the sequence of SEQ ID NO: 3528.

208. The multispecific molecule of claim 194, wherein:
(i) the VH comprises a heavy chain complementarity determining region 1 (HC CDR1) comprising the sequence of SEQ ID NO: 3650, a heavy chain complementarity determining region 2 (HC CDR2) comprising the sequence of SEQ ID NO: 3651, and a heavy chain complementarity determining region 3 (HC CDR3) comprising the sequence of SEQ ID NO: 5; and/or
(ii) the VL comprises a light chain complementarity determining region 1 (LC CDR1) comprising the sequence of SEQ ID NO: 3655, a light chain complementarity determining region 2 (LC CDR2) comprising the sequence of SEQ ID NO: 3653, and a light chain complementarity determining region 3 (LC CDR3) comprising the sequence of SEQ ID NO: 8.

209. The multispecific molecule of claim 208, wherein:
(i) the VH comprises an amino acid sequence having at least 90% sequence identity to the sequence of SEQ ID NO: 1346; and/or
(ii) the VL comprises an amino acid sequence having at least 90% sequence identity to the sequence of SEQ ID NO: 1349.

210. The multispecific molecule of claim 208, wherein:
(i) the VH comprises the sequence of SEQ ID NO: 1346; and/or
(ii) the VH comprises the sequence of SEQ ID NO: 1349.

211. The multispecific molecule of claim 194, wherein:
(i) the first polypeptide comprises the anti-TCRβV antibody heavy chain variable region operatively linked to the first immunoglobulin heavy chain constant region;
(ii) the second polypeptide comprises the IL-15 receptor alpha sushi domain or a functional fragment or variant thereof operatively linked to the IL-15 molecule or a functional fragment or variant thereof operatively linked to the second immunoglobulin heavy chain constant region; and
(iii) the third polypeptide comprises the anti-TCRβV antibody light chain variable region operatively linked to the immunoglobulin light chain constant region.

212. The multispecific molecule of claim 194, wherein:
(i) the first polypeptide comprises a sequence having at least 90% sequence identity to the sequence of SEQ ID NO: 1346 operatively linked to a sequence having at least 90% sequence identity to the sequence of SEQ ID NO: 3649;
(ii) the second polypeptide comprises a sequence having at least 90% sequence identity to the sequence of SEQ ID NO: 3523 operatively linked to a sequence having at least 90% sequence identity to the sequence of SEQ ID NO: 2170 operatively linked to a sequence having at least 90% sequence identity to the sequence of SEQ ID NO: 3648; and
(iii) the third polypeptide comprises a sequence having at least 90% sequence identity to the sequence of SEQ ID NO: 1349 operatively linked to a sequence having at least 90% sequence identity to the sequence of SEQ ID NO: 3644.

213. The multispecific molecule of claim 194, wherein the multispecific molecule comprises:
(i) the first polypeptide comprises the sequence of SEQ ID NO: 1346 operatively linked to the sequence of SEQ ID NO: 3649;
(ii) the second polypeptide comprises the sequence of SEQ ID NO: 3523 operatively linked to the sequence of SEQ ID NO: 2170 operatively linked to the sequence of SEQ ID NO: 3648; and
(iii) the third polypeptide comprises the sequence of SEQ ID NO: 1349 operatively linked to the sequence of SEQ ID NO: 3644.

214. The multispecific molecule of claim 213, wherein:
(i) the sequence of SEQ ID NO: 3523 is operatively linked to the sequence of SEQ ID NO: 2170 via the sequence of SEQ ID NO: 3524;
(ii) the sequence of SEQ ID NO: 2170 is operatively linked to the sequence of SEQ ID NO: 3648 via the sequence of SEQ ID NO: 3308; or
(iii) a combination thereof.

215. The multispecific molecule of claim 194, wherein:
(i) the first polypeptide comprises a sequence having at least 90% sequence identity to the sequence of SEQ ID NO: 3517;
(ii) the second polypeptide comprises a sequence having at least 90% sequence identity to the sequence of SEQ ID NO: 3519; and
(iii) the third polypeptide comprises a sequence having at least 90% sequence identity to the sequence of SEQ ID NO: 3518.

216. The multispecific molecule of claim 194, wherein:
(i) the first polypeptide comprises the sequence of SEQ ID NO: 3517;
(ii) the second polypeptide comprises the sequence of SEQ ID NO: 3519; and
(iii) the third polypeptide comprises the sequence of SEQ ID NO: 3518.

217. A multispecific molecule comprising a first polypeptide, a second polypeptide, and a third polypeptide,
wherein the first polypeptide, the second polypeptide, and the third polypeptide are non-contiguous; and
wherein:
(i) the first polypeptide comprises a sequence having at least 90% sequence identity to the sequence of SEQ ID NO: 1346 operatively linked to a sequence having at least 90% sequence identity to the sequence of SEQ ID NO: 3649;
(ii) the second polypeptide comprises a sequence having at least 90% sequence identity to any one sequence selected from the group consisting of SEQ ID NO: 2170, SEQ ID NO: 2193, SEQ ID NO: 2270, SEQ ID NO: 3540, and SEQ ID NO: 3542 operatively linked to a sequence having at least 90% sequence identity to the sequence of SEQ ID NO: 3648; and
(iii) the third polypeptide comprises a sequence having at least 90% sequence identity to the sequence of SEQ ID NO: 1349 operatively linked to a sequence having at least 90% sequence identity to the sequence of SEQ ID NO: 3644.

218. A recombinant polynucleotide comprising a sequence encoding the multispecific molecule of claim 194.

219. A method of making the multispecific molecule of claim 194 comprising culturing a host cell comprising a recombinant polynucleotide comprising a sequence encoding the multispecific molecule under conditions suitable for expression of the multispecific molecule.

220. A pharmaceutical composition comprising the multispecific molecule of claim 194, and a pharmaceutically acceptable carrier, excipient, diluent, or stabilizer.

221. A method of treating cancer in a subject in need thereof comprising administering to the subject a therapeutically effective amount of the multispecific molecule of claim 194, thereby treating the cancer in the subject.

222. The method of claim 221, wherein:
(i) the cancer is a solid tumor, a hematological cancer, a metastatic cancer, a soft tissue tumor, or any combination thereof,
(i) the cancer is a solid tumor selected from the group consisting of melanoma, pancreatic cancer, breast cancer, colorectal cancer, lung cancer, skin cancer, ovarian cancer, liver cancer, and any combination thereof; or
(ii) the cancer is a hematological cancer selected from the group consisting of Hodgkin's lymphoma, Non-Hodgkin's lymphoma, acute myeloid leukemia (AML), chronic myeloid leukemia, myelodysplastic syndrome, multiple myeloma, T-cell lymphoma, acute lymphocytic leukemia, and any combination thereof.
